(19) United States
(12) Patent Application Publication
(10) Pub. No.: US 2023/0139800 A1
(43) Pub. Date: May 4, 2023

(54) CAR T CELL THERAPIES WITH ENHANCED EFFICACY

(71) Applicants: Novartis AG, Basel (CH); The Trustees of the University of Pennsylvania, Philadelphia, PA (US)

(72) Inventors: Gregory Motz, Quincy, MA (US); Frederic Dixon Bushman, Rose Valley, PA (US); Joseph A. Fraietta, Cherry Hill, NJ (US); Carl H. June, Merion Station, PA (US); Jan J. Melenhorst, Cherry Hill, NJ (US); Christopher Loren Nobles, Philadelphia, PA (US); Regina M. Young, Bryn Mawr, PA (US)

(21) Appl. No.: 17/933,687

(22) Filed: Sep. 20, 2022

Related U.S. Application Data
(63) Continuation of application No. 15/760,519, filed on Mar. 15, 2018, now abandoned.
(60) Provisional application No. 62/220,196, filed on Sep. 17, 2015.

(51) Int. Cl. C07K 14/47; C07K 14/705; C12N 9/02; A61K 39/00; A61P 35/00; A61K 35/17; A61K 39/395

(52) U.S. Cl. CPC C07K 14/4748; C12Y 113/11; C07K 14/70503; C12N 9/0069; A61K 39/0011; A61K 39/001157; A61K 39/001112; A61K 39/001168; A61K 39/001153; A61K 39/00117; A61K 39/001113; A61K 39/001124; A61K 39/001192; A61K 39/001129; A61K 39/001106; A61K 39/001195; A61K 39/001171; A61K 39/001149; A61K 39/001182; A61K 39/001193; A61K 39/001104; A61K 39/001108; A61K 39/001119; A61K 39/001122; A61K 39/001126; A61K 39/00115; A61K 39/001156; A61K 39/001164; A61K 39/001166; A61K 39/001186; A61K 39/001191; A61K 39/001197; A61K 39/001176; A61K 39/001188; A61K 39/001109; A61K 39/001151; A61P 35/00; A61K 35/17; A61K 39/39558; A61K 2039/5158; A61K 2039/5156; A61K 2039/5154

(57) ABSTRACT

The invention provides compositions and methods improved CAR T cell therapies. Specifically, the invention provides cells with reduced Tet, e.g., Tet2 function or expression, and methods of use therefore. The invention further provides Tet2 inhibitors and methods of use therefore in connection with CAR T cells.

### CROSS REFERENCE TO RELATED APPLICATIONS

[0001] This application is a continuation of U.S. patent application Ser. No. 15/760,519 filed Mar. 15, 2018, which is a U.S. national phase application and claims the benefit of priority under 35 U.S.C. § 371 of International Application No. PCT/US2016/052260, filed Sep. 16, 2016, which claims priority to U.S. Application Ser. No. 62/220,196, filed Sep. 17, 2015, the contents of each of which are incorporated herein by reference in their entireties.

### SEQUENCE LISTING

[0002] The instant application contains a Sequence Listing which has been submitted electronically in XML format and is hereby incorporated by reference in its entirety. Said XML copy, created on Sep. 19, 2022, is named N2067-709820_SL.xml and is 1,914,447 bytes in size.

### FIELD OF THE INVENTION

[0003] The present invention relates generally to the use of immune effector cells (e.g., T cells, NK cells) engineered to express a Chimeric Antigen Receptor (CAR) to treat a disease associated with expression of a tumor antigen.

### BACKGROUND OF THE INVENTION

[0004] Adoptive cell transfer (ACT) therapy with autologous T-cells, especially with T-cells transduced with Chimeric Antigen Receptors (CARs), has shown promise in hematologic cancer trials. There is a medical need for T cell therapies, especially CAR T cell therapies with improved efficacy.

### SUMMARY OF THE INVENTION

[0005] The present invention provides compositions and methods that disrupt methylcytosine dioxygenase genes (e.g., Tet1, Tet2, Tet3), and uses of such compositions and methods for increasing the functional activities of engineered cells (e.g., gene-modified antigen-specific T cells, such as CAR T cells). In particular, the present invention provides methods and compositions for bolstering the therapeutic efficacy of chimeric antigen receptor (CAR) T cells. While not to be bound by the theory, disruption of a single allele of a Tet gene (e.g., a Tet1, Tet2, or Tet3) leads to decreased total levels of 5-hydroxymethylcytosine in association with enhanced proliferation, regulation of effector cytokine production and degranulation, and thereby increases CAR T cell proliferation and/or function.

[0006] Accordingly, the present invention provides a cell (e.g., a population of cells, such as a population of immune effector cells) engineered to express a chimeric antigen receptor (CAR), wherein the CAR comprises an antigen-binding domain, a transmembrane domain, and an intracellular signaling domain, and wherein expression and/or function of Tet1, Tet2 and/or Tet3 in said cell has been reduced or eliminated. In one embodiment, the expression and/or function of Tet2 in said cell has been reduced or eliminated. In some embodiments, the antigen-binding domain binds to a tumor antigen is selected from a group consisting of: TSHR, CD19, CD123, CD22, CD30, CD171, CS-1, CLL-1, CD33, EGFRvIII, GD2, GD3, BCMA, Tn Ag, PSMA, ROR1, FLT3, FAP, TAG72, CD38, CD44v6, CEA, EPCAM, B7H3, KIT, IL-13Ra2, Mesothelin, IL-11Ra, PSCA, PRSS21, VEGFR2, LewisY, CD24, PDGFR-beta, SSEA-4, CD20, Folate receptor alpha, ERBB2 (Her2/neu), MUC1, EGFR, NCAM, Prostase, PAP, ELF2M, Ephrin B2, IGF-I receptor, CAIX, LMP2, gp100, bcr-abl, tyrosinase, EphA2, Fucosyl GM1, sLe, GM3, TGS5, HMWMAA, o-acetyl-GD2, Folate receptor beta, TEM1/CD248, TEM7R, CLDN6, GPRC5D, CXORF61, CD97, CD179a, ALK, Polysialic acid, PLAC1, GloboH, NY-BR-1, UPK2, HAVCR1, ADRB3, PANX3, GPR20, LY6K, OR51E2, TARP, WT1, NY-ESO-1, LAGE-1a, MAGE-A1, legumain, HPV E6, E7, MAGE A1, ETV6-AML, sperm protein 17, XAGE1, Tie 2, MAD-CT-1, MAD-CT-2, Fos-related antigen 1, p53, p53 mutant, prostein, survivin and telomerase, PCTA-1/Galectin 8, MelanA/MART1, Ras mutant, hTERT, sarcoma translocation breakpoints, ML-IAP, ERG (TMPRSS2 ETS fusion gene), NA17, PAX3, Androgen receptor, Cyclin B1, MYCN, RhoC, TRP-2, CYP1B1, BORIS, SART3, PAX5, OY-TES1, LCK, AKAP-4, SSX2, RAGE-1, human telomerase reverse transcriptase, RU1, RU2, intestinal carboxyl esterase, mut hsp70-2, CD79a, CD79b, CD72, LAIR1, FCAR, LILRA2, CD300LF, CLEC12A, BST2, EMR2, LY75, GPC3, FCRL5, and IGLL1. In one embodiment, the tumor antigen is CD19. In some embodiments, the antigen-binding domain is an antibody or antibody fragment as described in, e.g., WO2012/079000 or WO2014/153270.

[0007] In one aspect, the present invention provides a cell (e.g., a population of cells, such as a population of immune effector cells) engineered to express a CAR, and wherein expression and/or function of Tet1, Tet2 and/or Tet3 in said cell has been reduced or eliminated. In one embodiment, the expression and/or function of Tet2 in said cell has been reduced or eliminated. In some embodiments, the transmembrane domain of said CAR comprises: (i) an amino acid sequence having at least one, two or three modifications but not more than 20, 10 or 5 modifications of an amino acid sequence of SEQ ID NO: 12, or a sequence with 95-99% identity to an amino acid sequence of SEQ ID NO: 12; or (ii) the sequence of SEQ ID NO: 12.

[0008] In one aspect, the present invention provides a cell (e.g., a population of cells, such as a population of immune effector cells) engineered to express a CAR, and wherein expression and/or function of Tet1, Tet2 and/or Tet3 in said cell has been reduced or eliminated. In one embodiment, the antigen binding domain of said CAR is connected to the transmembrane domain by a hinge region, wherein said hinge region comprises SEQ ID NO: 2 or SEQ ID NO: 6, or a sequence with 95-99% identity thereof. In some embodiments, the intracellular signaling domain of said CAR comprises a primary signaling domain and/or a costimulatory signaling domain, wherein the primary signaling domain comprises a functional signaling domain of a protein chosen from CD3 zeta, CD3 gamma, CD3 delta, CD3 epsilon, common FcR gamma (FCER1G), FcR beta (Fc Epsilon Rib), CD79a, CD79b, Fcgamma RIIa, DAP10, or DAP12.

[0009] In some embodiments, the primary signaling domain of said CAR comprises: (i) an amino acid sequence having at least one, two or three modifications but not more than 20, 10 or 5 modifications of an amino acid sequence of SEQ ID NO: 18 or SEQ ID NO: 20, or a sequence with 95-99% identity to an amino acid sequence of SEQ ID NO: 18 or SEQ ID NO: 20; or (ii) the amino acid sequence of SEQ ID NO:18 or SEQ ID NO: 20. In some embodiments, the intracellular signaling domain of said CAR comprises a costimulatory signaling domain, or a primary signaling domain and a costimulatory signaling domain, wherein the costimulatory signaling domain comprises a functional signaling domain of a protein selected from the group consisting of CD27, CD28, 4-1BB (CD137), OX40, CD30, CD40, PD-1, ICOS, lymphocyte function-associated antigen-1 (LFA-1), CD2, CD7, LIGHT, NKG2C, B7-H3, a ligand that specifically binds with CD83, CDS, ICAM-1, GITR, BAFFR, HVEM (LIGHTR), SLAMF7, NKp80 (KLRF1), CD160, CD19, CD4, CD8alpha, CD8beta, IL2R beta, IL2R gamma, IL7R alpha, ITGA4, VLA1, CD49a, ITGA4, IA4, CD49D, ITGA6, VLA-6, CD49f, ITGAD, CD11d, ITGAE, CD103, ITGAL, CD11a, LFA-1, ITGAM, CD11b, ITGAX, CD11c, ITGB1, CD29, ITGB2, CD18, LFA-1, ITGB7, TNFR2, TRANCE/RANKL, DNAM1 (CD226), SLAMF4 (CD244, 2B4), CD84, CD96 (Tactile), CEACAM1, CRTAM, Ly9 (CD229), CD160 (BY55), PSGL1, CD100 (SEMA4D), CD69, SLAMF6 (NTB-A, Ly108), SLAM (SLAMF1, CD150, IPO-3), BLAME (SLAMF8), SELPLG (CD162), LTBR, LAT, GADS, SLP-76, PAG/Cbp, NKp44, NKp30, NKp46, and NKG2D.

[0010] In some embodiments, the costimulatory signaling domain of said CAR comprises an amino acid sequence having at least one, two or three modifications but not more than 20, 10 or 5 modifications of an amino acid sequence of SEQ ID NO: 14 or SEQ ID NO: 16, or a sequence with 95-99% identity to an amino acid sequence of SEQ ID NO: 14 or SEQ ID NO: 16. In some embodiments, the intracellular domain of said CAR comprises the sequence of SEQ ID NO: 14 or SEQ ID NO: 16, and the sequence of SEQ ID NO: 18 or SEQ ID NO: 20, wherein the sequences comprising the intracellular signaling domain are expressed in the same frame and as a single polypeptide chain. In some embodiments, the CAR of the present invention further comprises a leader sequence comprises the sequence of SEQ ID NO: 2.

[0011] In some embodiments, the immune effector cell of the present invention is a T cell or an NK cell. In some embodiments, the T cell is a CD4+ T cell, a CD8+ T cell, or a combination thereof. In one aspect, the cells of the present invention are human cells. In one aspect, the cells (e.g., engineered immune effector cells, e.g., CAR T cells) of the present invention comprise an inhibitor of Tet1, Tet2, and/or Tet3. In some embodiments, the cells of the present invention comprise a CAR, and an inhibitor of Tet1, Tet2 and/or Tet3, wherein said inhibitor is (1) a gene editing system targeted to one or more sites within the gene encoding Tet1, Tet2 and/or Tet3, or its regulatory elements, e.g., Tet2, or its regulatory elements; (2) nucleic acid encoding one or more components of said gene editing system; or (3) combinations thereof.

[0012] In some embodiments, the cells of the present invention comprise a CAR, and an inhibitor of Tet1, Tet2 and/or Tet3, wherein said inhibitor is a gene editing system targeted to one or more sites within the gene encoding Tet1, Tet2 and/or Tet3, or its regulatory elements, e.g., Tet2, or its regulatory elements, and wherein the gene editing system is selected from the group consisting of: a CRISPR/Cas9 system, a zinc finger nuclease system, a TALEN system and a meganuclease system.

[0013] In some embodiments, the cells of the present invention comprise a CAR, and an inhibitor of Tet1, Tet2 and/or Tet3, wherein said inhibitor is a gene editing system targeted to one or more sites within the gene encoding Tet1, Tet2 and/or Tet3, or its regulatory elements, e.g., Tet2, or its regulatory elements, and wherein the gene editing system binds to a target sequence in an early exon or intron of a gene encoding Tet1, Tet2 and/or Tet3, e.g., Tet2.

[0014] In some embodiments, the cells of the present invention comprise a CAR, and an inhibitor of Tet1, Tet2 and/or Tet3, wherein said inhibitor is a gene editing system targeted to one or more sites within the gene encoding Tet1, Tet2 and/or Tet3, or its regulatory elements, e.g., Tet2, or its regulatory elements, and wherein the gene editing system binds a target sequence of a gene encoding tet2, and the target sequence is upstream of exon 4, e.g., in exon1, exon2, or exon3, e.g. in exon 3.

[0015] In some embodiments, the cells of the present invention comprise a CAR, and an inhibitor of Tet1, Tet2 and/or Tet3, wherein said inhibitor is a gene editing system targeted to one or more sites within the gene encoding Tet1, Tet2 and/or Tet3, or its regulatory elements, e.g., Tet2, or its regulatory elements, and wherein the gene editing system binds to a target sequence in a late exon or intron of a gene encoding Tet1, Tet2 and/or Tet3, e.g., Tet2.

[0016] In some embodiments, the cells of the present invention comprise a CAR, and an inhibitor of Tet1, Tet2 and/or Tet3, wherein said inhibitor is a gene editing system targeted to one or more sites within the gene encoding Tet1, Tet2 and/or Tet3, or its regulatory elements, e.g., Tet2, or its regulatory elements, and wherein the gene editing system binds a target sequence of a gene encoding tet2, and the target sequence is downstream of exon 8, e.g., is in exon9, exon10, or exon11, e.g. is in exon 9.

[0017] In some embodiments, the cells of the present invention comprise a CAR, and an inhibitor of Tet1, Tet2 and/or Tet3, wherein said inhibitor is a gene editing system targeted to one or more sites within the gene encoding Tet1, Tet2 and/or Tet3, or its regulatory elements, e.g., Tet2, or its regulatory elements, and wherein the gene editing system is a CRISPR/Cas system comprising a gRNA molecule comprising a targeting sequence which hybridize to a target sequence of a Tet2 gene. In some embodiments, the targeting sequence is a targeting sequence listed in Table 3. In some embodiments, the target sequence is a targeting sequence listed in Table 5.

[0018] In some embodiments, the cells of the present invention comprise a CAR, and an inhibitor of Tet1, Tet2 and/or Tet3, wherein said inhibitor is an siRNA or shRNA specific for Tet1, Tet2, Tet3, or nucleic acid encoding said siRNA or shRNA. In some embodiments, the siRNA or shRNA comprises a sequence complementary to a sequence of a Tet2 mRNA, e.g., comprises a target sequence of shRNA listed in Table 4.

[0019] In some embodiments, the cells of the present invention comprise a CAR, and an inhibitor of Tet1, Tet2 and/or Tet3, wherein said inhibitor a small molecule.

[0020] In some embodiments, the cells of the present invention comprise a CAR, and an inhibitor of Tet1, Tet2 and/or Tet3, wherein the inhibitor is a protein, e.g., is a dominant negative binding partner of Tet1, Tet2, and/or Tet3 (e.g., a histone deacetylase (HDAC) that interacts with Tet1, Tet2, and/or Tet3), or nucleic acid encoding said dominant negative binding partner of Tet1, Tet2, and Tet3.

[0021] In some embodiments, the cells of the present invention comprise a CAR, and an inhibitor of Tet1, Tet2 and/or Tet3, wherein the inhibitor is a protein, e.g., is a dominant negative (e.g., catalytically inactive) Tet1, Tet2, or Tet3, or nucleic acid encoding said dominant negative Tet1, Tet2, or Tet3.

[0022] In one aspect, the present invention provides a method of increasing the therapeutic efficacy of a CAR-expressing cell, e.g., a cell of any of the previous claims, e.g., a CAR19-expressing cell (e.g., CTL019), comprising a step of decreasing the level of 5-hydroxymethylcytosine in said cell. In some embodiments, said step comprises contacting said cells with a Tet (e.g., Tet1, Tet2, and/or Tet3) inhibitor. In some embodiments, said Tet inhibitor is a Tet2 inhibitor. In some embodiments, a Tet (e.g., Tet1, Tet2, and/or Tet3) inhibitor of the present invention is selected from the group consisting of: (1) a gene editing system targeted to one or more sites within the gene encoding Tet1, Tet2, or Tet3, or its corresponding regulatory elements; (2) a nucleic acid (e.g., an siRNA or shRNA) that inhibits expression of Tet1, Tet2, or Tet3; (3) a protein (e.g., a dominant negative, e.g., catalytically inactive) Tet1, Tet2, or Tet3, or a binding partner of Tet1, Tet2, or Tet3; (4) a small molecule that inhibits expression and/or function of Tet1, Tet2, or Tet3; (5) a nucleic acid encoding any of (1)-(3); and (6) any combination of (1)-(5). In some embodiments, the Tet inhibitor of the present invention is a Tet2 inhibitor.

[0023] In one aspect, the present invention provides a method of increasing the therapeutic efficacy of a CAR-expressing cell, e.g., a cell of any of the previous claims, e.g., a CAR19-expressing cell (e.g., CTL019), comprising a step of decreasing the level of 5-hydroxymethylcytosine in said cell. In some embodiments, said step comprises contacting said cells with a Tet (e.g., Tet1, Tet2, and/or Tet3) inhibitor. In some embodiments, said contacting occurs ex vivo. In some embodiments, said contacting occurs in vivo. In some embodiments, said contacting occurs in vivo prior to delivery of nucleic acid encoding a CAR into the cell. In some embodiments, said contacting occurs in vivo after the cells have been administered to a subject in need thereof.

[0024] In one aspect, the present invention provides a method of increasing the therapeutic efficacy of a CAR-expressed cell, e.g., a cell of any of the previous claims, e.g., a CAR19-expressing cell (e.g., CTL019), comprising a step of contacting said cell with a Tet inhibitor, e.g., a Tet1, Tet2 and/or Tet3 inhibitor. In some embodiments, said Tet inhibitor is a Tet2 inhibitor. In some embodiments, a Tet (e.g., Tet1, Tet2, and/or Tet3) inhibitor of the present invention is selected from the group consisting of. (1) a gene editing system targeted to one or more sites within the gene encoding Tet1, Tet2, or Tet3, or its corresponding regulatory elements; (2) a nucleic acid (e.g., an siRNA or shRNA) that inhibits expression of Tet1, Tet2, or Tet3; (3) a protein (e.g., a dominant negative, e.g., catalytically inactive) Tet1, Tet2, or Tet3, or a binding partner of Tet1, Tet2, or Tet3; (4) a small molecule that inhibits expression and/or function of Tet1, Tet2, or Tet3; (5) a nucleic acid encoding any of (1)-(3); and (6) any combination of (1)-(5). In some embodiments, the Tet inhibitor of the present invention is a Tet2 inhibitor.

[0025] In one aspect, the present invention provides a method of increasing the therapeutic efficacy of a CAR-expressed cell, e.g., a cell of any of the previous claims, e.g., a CAR19-expressing cell (e.g., CTL019), comprising a step of contacting said cell with a Tet inhibitor, e.g., a Tet1, Tet2 and/or Tet3 inhibitor. In some embodiments, said step comprises contacting said cells with a Tet (e.g., Tet1, Tet2, and/or Tet3) inhibitor. In some embodiments, said contacting occurs ex vivo. In some embodiments, said contacting occurs in vivo. In some embodiments, said contacting occurs in vivo prior to delivery of nucleic acid encoding a CAR into the cell. In some embodiments, said contacting occurs in vivo after the cells have been administered to a subject in need thereof.

[0026] In one aspects, the present invention provides a method of treating a subject in need thereof, comprising administering to said subject an effective amount of the cells as described herein, e.g., an immune effector cell (e.g., T cell or NK cell) comprising a CAR, and, optionally, administering to said subject a Tet1, Tet2, and/or Tet3 inhibitor. In some embodiments, the subject receives a pre-treatment of the Tet1, Tet2 and/or Tet3 inhibitor, and prior to the initiation of the CAR-expressing cell therapy. In some embodiments, the subject receives concurrent treatment with a Tet1, Tet2, and/or Tet3 inhibitor and the CAR expressing cell therapy. In some embodiments, the subject receives treatment with a Tet1, Tet2, and/or Tet3 inhibitor post-CAR-expressing cell therapy. In some embodiments, the subject has a disease associated with expression of a tumor antigen, e.g., a proliferative disease, a precancerous condition, a cancer, and a non-cancer related indication associated with expression of the tumor antigen. In some embodiments, the subject has a hematologic cancer chosen from one or more of chronic lymphocytic leukemia (CLL), acute leukemias, acute lymphoid leukemia (ALL), B-cell acute lymphoid leukemia (B-ALL), T-cell acute lymphoid leukemia (T-ALL), chronic myelogenous leukemia (CML), B cell prolymphocytic leukemia, blastic plasmacytoid dendritic cell neoplasm, Burkitt's lymphoma, diffuse large B cell lymphoma, follicular lymphoma, hairy cell leukemia, small cell- or a large cell-follicular lymphoma, malignant lymphoproliferative conditions, MALT lymphoma, mantle cell lymphoma, marginal zone lymphoma, multiple myeloma, myelodysplasia and myelodysplastic syndrome, non-Hodgkin's lymphoma, Hodgkin's lymphoma, plasmablastic lymphoma, plasmacytoid dendritic cell neoplasm, Waldenstrom macroglobulinemia, or preleukemia.

[0027] The present invention provides uses of the compositions and/or methods described here for treatment of cancer, wherein the cancer is selected from the group consisting of colon cancer, rectal cancer, renal-cell carcinoma, liver cancer, non-small cell carcinoma of the lung, cancer of the small intestine, cancer of the esophagus, melanoma, bone cancer, pancreatic cancer, skin cancer, cancer of the head or neck, cutaneous or intraocular malignant melanoma, uterine cancer, ovarian cancer, rectal cancer, cancer of the anal region, stomach cancer, testicular cancer, uterine cancer, carcinoma of the fallopian tubes, carcinoma of the endometrium, carcinoma of the cervix, carcinoma of the vagina, carcinoma of the vulva, Hodgkin's Disease, non-Hodgkin's lymphoma, cancer of the endocrine system, cancer of the thyroid gland, cancer of the parathyroid gland, cancer of the adrenal gland, sarcoma of soft tissue, cancer of the urethra, cancer of the penis, solid tumors of childhood, cancer of the bladder, cancer of the kidney or ureter, carcinoma of the renal pelvis, neoplasm of the central nervous system (CNS), primary CNS lymphoma, tumor angiogenesis, spinal axis tumor, brain stem glioma, pituitary adenoma, Kaposi's sarcoma, epidermoid cancer, squamous cell cancer, T-cell lymphoma, environmentally induced cancers, combinations of said cancers, and metastatic lesions of said cancers.

[0028] The present invention provides Tet1, Tet2 and/or Tet3 inhibitors for use in the treatment of a subject, wherein said subject has received, is receiving, or is about to receive therapy comprising a CAR-expressing cell.

[0029] The present invention further provides a method of manufacturing a CAR-expressing cell, comprising introducing nucleic acid encoding a CAR into a cell such that said nucleic acid (or CAR-encoding portion thereof) integrates into the genome of the cell within a Tet1, Tet2 and/or Tet3 gene (e.g., within an intron or exon of a Tet1, Tet2 and/or Tet3 gene), such that Tet1, Tet2 and/or Tet3 expression and/or function is reduced or eliminated.

[0030] The present invention further provides a method of manufacturing a CAR-expressing cell, comprising contacting said CAR-expressing cell ex vivo with a Tet1, Tet2 and/or Tet3 inhibitor. In some embodiments, the inhibitor is a Tet2 inhibitor.

[0031] The present invention further provides a vector comprising sequence encoding a CAR and sequence encoding a Tet inhibitor, e.g., a Tet1, Tet2, and/or Tet3 inhibitor. In some embodiments, the Tet inhibitor is a (1) a gene editing system targeted to one or more sites within the gene encoding Tet1, Tet2, or Tet3, or its corresponding regulatory elements; (2) a nucleic acid (e.g., an siRNA or shRNA) that inhibits expression of Tet1, Tet2, or Tet3; (3) a protein (e.g., a dominant negative, e.g., catalytically inactive) Tet1, Tet2, or Tet3, or a binding partner of Tet1, Tet2, or Tet3; and (4) a nucleic acid encoding any of (1)-(3), or combinations thereof. In some embodiments, the sequence encoding a CAR and the sequence encoding a Tet inhibitor are separated by a 2A site.

[0032] The present invention further provides a gene editing system that is specific for a sequence of a Tet gene or its regulatory elements, e.g., a Tet1, Tet2 or Tet3 gene or its regulatory elements. In some embodiments, the gene editing system is specific for a sequence of a Tet2 gene. In some embodiments, the gene editing system is (1) a CRISPR/Cas gene editing system, (2) a zinc finger nuclease system, a TALEN system and a meganuclease system. In some embodiments, the gene editing system is a CRISPR/Cas gene editing system. In some embodiments, the gene editing system comprises: a gRNA molecule comprising a targeting sequence specific to a sequence of a Tet2 gene or its regulatory elements, and a Cas9 protein; a gRNA molecule comprising a targeting sequence specific to a sequence of a Tet2 gene or its regulatory elements, and a nucleic acid encoding a Cas9 protein; a nucleic acid encoding a gRNA molecule comprising a targeting sequence specific to a sequence of a Tet2 gene or its regulatory elements, and a Cas9 protein; or a nucleic acid encoding a gRNA molecule comprising a targeting sequence specific to a sequence of a Tet2 gene or its regulatory elements, and a nucleic acid encoding a Cas9 protein. In some embodiments, the gene editing system further comprises a template DNA. In some embodiments, the template DNA comprises nucleic acid sequence encoding a CAR, e.g., a CAR as described herein.

[0033] The present invention further provides a composition for the ex vivo manufacture of a CAR-expressing cell, comprising a Tet inhibitor, e.g., a Tet1, Tet2, and/or Tet3 inhibitor, e.g., a Tet2 inhibitor. In some embodiments, the Tet inhibitor is selected from N-[3-[7-(2,5-dimethyl-2H-pyrazol-3-ylamino)-1-methyl-2-oxo-1,4-dihydro-2H-pyrimido[4,5-d]pyrimidin-3-yl]-4-methylphenyl]-3-trifluoromethyl-benzamide, 2-[(2,6-dichloro-3-methylphenyl)amino]benzoic acid and 2-hydroxyglutarate.

[0034] The present invention further provides a population of cells comprising one or more cells described herein, wherein the population of cells comprises a higher percentage of Tscm cells (e.g., CD45RA+CD62L+CCR7+CD27+CD95+ T cells) than a population of cells which does not comprise one or more cells in which expression and/or function of Tet1, Tet2 and/or Tet3 in said cell has been reduced or eliminated.

### BRIEF DESCRIPTION OF THE DRAWINGS

[0035] FIG. 1: CD19-expressing CART cells were administered to a patient (UPCC04409-10) for the treatment of CLL. CART cells in patient UPCC04409-10 were monitored over time by sampling blood. The amount of BBZ expression in cells was determined (red). The number of copies of sequence from the Vbeta5.1 TCR family was determined (blue). Both measurements were made from samples collected on the indicated days after the second infusion of CART cells.

[0036] FIGS. 2A and 2B: The T-cell receptor repertoire from patient UPCC04409-10 was determined from a sample collected on day 28 (FIG. 2A) or day 51 (FIG. 2B) after CART infusion. This demonstrates the abundance of the TCRBV05-01 family of T-cell receptors at day 51 indicating clonal expansion over time.

[0037] FIG. 3: The T-cells isolated from patient UPCC04409-10 were analyzed for the simultaneous expression of CAR19 and 2 different TCR family genes over time (day 50 and day 51) and compared to the input dosed material (product): upper panel is TCR family Vb13.1; the lower panel shows TCR family Vb5.1. The data demonstrate that the CAR19 positive cells contain a single TCR family gene (Vb5.1) that becomes rapidly enriched between days 50 and 51.

[0038] FIG. 4: The T-cell receptor repertoire of CD8 positive cells from patient UPCC04409-10 was determined from a sample collected on day 51 after CART infusion. This demonstrates the abundance of the TCRBV05-01 family of T-cell receptors at day 51 indicating clonal expansion of CD8 positive cells over time.

[0039] FIG. 5: The T-cell receptor from patient UPCC04409-10 was sequenced and the sequence of the alpha and beta chains are shown (Amino Acid sequences disclosed as SEQ ID NOS: 1297-1298 and Nucleotide sequences disclosed as SEQ ID NOS: 1299-1301, all respectively, in order of appearance).

[0040] FIG. 6: Sonically fragmented DNA was generated from T-cells from Patient UPCC04409-10. This material was used to amplify genomic sequences adjacent to the CAR19 insertion. The genes indicated were identified as being enriched relative to the infused product (DO) adjacent to CAR19 in the genome. At the different time points after CART infusion indicated (d=day; m=month), a different relative abundance of adjacent genes was seen, with Tet2 abundance peaking in both peripheral blood (PBMC) and CAR+CD8+ T-cells samples at day 51.

[0041] FIG. 7: The site of insertion of the CAR19 gene was mapped to the Tet2 gene. More specifically, the insertion occurred between exons 9 and 10 of the Tet2 gene. The catalytic domain for Tet2 resides in exon 11. The insertion at this location may lead to expression of aberrant mRNA transcripts or decrease the expression of functional (wild-type) Tet2.

[0042] FIG. 8: Transcripts of the Tet2 gene from mRNA isolated from patient UPCC04409-10 were evaluated by RTPCR using primers spanning the indicated regions of Tet2 or CAR19 or both as indicated in the right hand side of the figure. Rxn 3 contains primers designed to amplify the region of the Tet2 transcript spanning exons 9 and 10. Rxn, 6, 7, 8, 9, and 10 are primers designed to amplify the indicated portions of the CAR19 lentivirus. Rxn 12-16 are pairs of primers that contain exon 9 sequence of the Tet2 transcript as well as sequence from the CAR19 lentiviral construct. These data show that transcripts are made from the Tet2 locus that contains both Tet2 sequence as well as CAR19 sequence.

[0043] FIG. 9: A schematic representation of the transcripts derived from the Tet2 locus discovered in FIGS. 10A and 10B is shown. This figure indicates splice variants of this Tet2/CAR19 fusion that were detected in the patient sample. This analysis has revealed that the CAR19 insertion into Tet2 has resulted in transcripts containing stop codons upstream of exon 11. Exon 11 has been demonstrated to be important for Tet2 function. This suggests Tet2 function has been disrupted by the insertion of the CAR19. This also suggests that the disruption of Tet2 function has resulted in favorable expansion of this individual CART clones.

[0044] FIGS. 10A and 10B: The enzymatic activity of Tet2 is schematized (FIG. 10A). Tet family protein convert 5-methylcytosine (5-mc) to 5-hydroxymethylcytosine (5-hmc) and then into 5-formylcytosine (5-fmc) resulting in demethylated cytosine. Methylated DNA is an epigenetic state that is known to affect transcriptional profiles. The methylation state of the T-cells from patient UPCC04409-10 was evaluated (FIG. 10B). The patient's T-cells were stained for TCRVb5.1 (which contain the CAR19 insertion at Tet2) and the 5-hmc and 5-fmc were evaluated in TCRVb5.1 positive (red) and TCRVb5.1 negative (blue) populations by flow cytometry. This data indicates that the cells containing the insertion of CAR19 in the Tet2 gene are defective in demethylation.

[0045] FIG. 11: TET2 shRNAs reduce 5-hmc levels in normal human T cells. TET2 and scramble control shRNA constructs expressing mCherry were introduced into normal human T cells. 5-hmc levels were determined by intracellular staining by FACS on day 6 following expansion with anti-CD3/CD28 beads. Knockdown of TET2 reduced overall 5-hmc levels.

[0046] FIG. 12: TET2 shRNAs expand Tscm T cells. TET2 and scramble control shRNA constructs expressing mCherry were introduced into normal human T cells. CD45RA+CD62L+CCR7+CD27+CD95+ Tscm T cells were determined by FACS staining on day 11 following expansion with anti-CD3/CD28 beads. Knockdown of TET2 promoted the expansion of T cells with a Tscm phenotype.

[0047] FIG. 13A: Gating strategy for quantification of CAR+ cells.

[0048] FIG. 13B: CAR expression levels in cells electroporated with CRISPR/Cas systems targeting Tet2, as compared with untransfected cells.

[0049] FIG. 14: Quantitation of CD4+ and CD8+ cells after CAR transduction and Tet2 editing.

[0050] FIG. 15: Effect of Tet2 inhibition on CD3/CD28 bead expansion of CAR T cells.

[0051] FIG. 16: Effect of Tet2 inhibition on antigen-dependendent interleukin-2 (IL-2) production by CAR T cells.

[0052] FIG. 17: Effect of Tet2 inhibition on antigen-dependendent interferon gamma production by CAR T cells.

[0053] FIG. 18: Effect of Tet2 inhibition on antigen-driven CAR+ T cell proliferation.

[0054] FIG. 19: Effect of Tet2 inhibition on antigen-driven T cell proliferation.

[0055] FIG. 20: Effect of Tet2 inhibition on antigen-driven CD4+ T cell proliferation.

[0056] FIG. 21: Effect of Tet2 inhibition on antigen-driven CAR+CD4+ T cell proliferation.

[0057] FIG. 22: Effect of Tet2 inhibition on antigen-driven CD8+ T cell proliferation.

[0058] FIG. 23: Effect of Tet2 inhibition on antigen-driven CAR+CD8+ T cell proliferation.

[0059] FIG. 24: % editing, and % frameshift edit by introduction of CRISPR/Cas systems targeting Tet2 as measured by NGS.

[0060] FIG. 25: Top 5 most frequent indels observed in T cells after addition of RNP that included the indicated TET2 Exon 3-targeting gRNAs (SEQ ID NOS: 1302-1326, respectively, in order of appearance). Changes from the unmodified wt sequence are shown, with insertions represented with lowercase letters (“a”. “t”, “g” and “c”) and deletions shown with a dash (“—”). Indel frequency is shown in the right-most column.

[0061] FIG. 26: Top 5 most frequent indels observed in T cells after addition of RNP that included the indicated TET2 Exon 9-targeting gRNAs (SEQ ID NOS: 1327-1356, respectively, in order of appearance). Changes from the unmodified wt sequence are shown, with insertions represented with lowercase letters (“a,” “t,” “g,” and “c”) and deletions shown with a dash (“—”). Indel frequency is shown in the right-most column.

[0062] FIG. 27: Schematic experimental protocol for determination of TET2 knockdown in Jurkat cells in response to lentivirus encoding shRNA TET2 inhibitors.

[0063] FIG. 28: RFP expression in shRNA infected Jurkat cells. RFP expression was determined by FACS on day 6 after puromycin treatment. Based on RFP expression, greater than 99% shRNA introduced jurkat cells were selected by puromycin treatment.

[0064] FIG. 29: Knockdown efficiency of tet2 in TET2 shRNAs infected Jurkat cells. qRT-PCR experiment was performed. The expression levels of tet1 and tet3 were also measured. 3-actin serves as an internal control to quantify relative gene expression among samples tested. To increase reliability of qRT-PCR, two j-actin primers and one RPLP1 primer were used in this experiment.

[0065] FIG. 30: Knockdown of TET2 protein in response to shRNAs in Jurkat cells. A western blot experiment was performed.

[0066] FIG. 31A: Venn diagrams of ATAC peaks in the CAR+CD8+ T cells from a patient with a Tet2 disruption compared to CAR-CD8+ T cells from the same patient at the matched time point without the Tet2 disruption. The box plots show differences in ATAC enrichment between the two cell populations.

[0067] FIG. 31B: GO terms associated with ATAC peaks more closed in the cell population with the Tet2 disruption, compared to its counterpart.

[0068] FIG. 32A: Silencing of Tet2 by shRNA in primary CD8+ T cells from healthy donors as measured by quantitative PCR. Expression (mean, SEM) normalized to GAPDH is presented as fold change relative to non-targeting control shRNA.

[0069] FIGS. 32B and 32C: Relative frequencies of central memory (FIG. 32B) and effector CD8+ T cells (FIG. 32C) at day 14 post-expansion via CD3/CD28 stimulation in the same healthy donors as presented in A.

### DETAILED DESCRIPTION

### Definitions

[0070] Unless defined otherwise, all technical and scientific terms used herein have the same meaning as commonly understood by one of ordinary skill in the art to which the invention pertains.

[0071] The term “a” and “an” refers to one or to more than one (i.e., to at least one) of the grammatical object of the article. By way of example, “an element” means one element or more than one element.

[0072] The term “about” when referring to a measurable value such as an amount, a temporal duration, and the like, is meant to encompass variations of 20% or in some instances ±10%, or in some instances ±5%, or in some instances ±1%, or in some instances ±0.1% from the specified value, as such variations are appropriate to perform the disclosed methods.

[0073] The term “Chimeric Antigen Receptor” or alternatively a “CAR” refers to a set of polypeptides, typically two in the simplest embodiments, which when in an immune effector cell, provides the cell with specificity for a target cell, typically a cancer cell, and with intracellular signal generation. In some embodiments, a CAR comprises at least an extracellular antigen binding domain, a transmembrane domain and a cytoplasmic signaling domain (also referred to herein as “an intracellular signaling domain”) comprising a functional signaling domain derived from a stimulatory molecule and/or costimulatory molecule as defined below. In some aspects, the set of polypeptides are contiguous with each other. In some embodiments, the set of polypeptides include a dimerization switch that, upon the presence of a dimerization molecule, can couple the polypeptides to one another, e.g., can couple an antigen binding domain to an intracellular signaling domain. In one aspect, the stimulatory molecule is the zeta chain associated with the T cell receptor complex. In one aspect, the cytoplasmic signaling domain further comprises one or more functional signaling domains derived from at least one costimulatory molecule as defined below. In one aspect, the costimulatory molecule is chosen from the costimulatory molecules described herein, e.g., 4-1BB (i.e., CD137), CD27 and/or CD28. In one aspect, the CAR comprises a chimeric fusion protein comprising an extracellular antigen binding domain, a transmembrane domain and an intracellular signaling domain comprising a functional signaling domain derived from a stimulatory molecule. In one aspect, the CAR comprises a chimeric fusion protein comprising an extracellular antigen binding domain, a transmembrane domain and an intracellular signaling domain comprising a functional signaling domain derived from a costimulatory molecule and a functional signaling domain derived from a stimulatory molecule. In one aspect, the CAR comprises a chimeric fusion protein comprising an extracellular antigen binding domain, a transmembrane domain and an intracellular signaling domain comprising two functional signaling domains derived from one or more costimulatory molecule(s) and a functional signaling domain derived from a stimulatory molecule. In one aspect, the CAR comprises a chimeric fusion protein comprising an extracellular antigen binding domain, a transmembrane domain and an intracellular signaling domain comprising at least two functional signaling domains derived from one or more costimulatory molecule(s) and a functional signaling domain derived from a stimulatory molecule. In one aspect, the CAR comprises an optional leader sequence at the amino-terminus (N-ter) of the CAR fusion protein. In one aspect, the CAR further comprises a leader sequence at the N-terminus of the extracellular antigen binding domain, wherein the leader sequence is optionally cleaved from the antigen binding domain (e.g., a scFv) during cellular processing and localization of the CAR to the cellular membrane.

[0074] A CAR that comprises an antigen binding domain (e.g., a scFv, or TCR) that targets a specific tumor maker X, such as those described herein, is also referred to as XCAR. For example, a CAR that comprises an antigen binding domain that targets CD19 is referred to as CD19CAR.

[0075] The term “signaling domain” refers to the functional portion of a protein which acts by transmitting information within the cell to regulate cellular activity via defined signaling pathways by generating second messengers or functioning as effectors by responding to such messengers.

[0076] The term “antibody,” as used herein, refers to a protein, or polypeptide sequence derived from an immunoglobulin molecule which specifically binds with an antigen. Antibodies can be polyclonal or monoclonal, multiple or single chain, or intact immunoglobulins, and may be derived from natural sources or from recombinant sources. Antibodies can be tetramers of immunoglobulin molecules.

[0077] The term “antibody fragment” refers to at least one portion of an antibody, that retains the ability to specifically interact with (e.g., by binding, steric hinderance, stabilizing/destabilizing, spatial distribution) an epitope of an antigen. Examples of antibody fragments include, but are not limited to, Fab, Fab′, F(ab′)₂, Fv fragments, scFv antibody fragments, disulfide-linked Fvs (sdFv), a Fd fragment consisting of the VH and CH1 domains, linear antibodies, single domain antibodies such as sdAb (either VL or VH), camelid VHH domains, multi-specific antibodies formed from antibody fragments such as a bivalent fragment comprising two Fab fragments linked by a disulfide brudge at the hinge region, and an isolated CDR or other epitope binding fragments of an antibody. An antigen binding fragment can also be incorporated into single domain antibodies, maxibodies, minibodies, nanobodies, intrabodies, diabodies, triabodies, tetrabodies, v-NAR and bis-scFv (see, e.g., Hollinger and Hudson, Nature Biotechnology 23:1126-1136, 2005). Antigen binding fragments can also be grafted into scaffolds based on polypeptides such as a fibronectin type III (Fn3)(see U.S. Pat. No. 6,703,199, which describes fibronectin polypeptide minibodies).

[0078] The term “scFv” refers to a fusion protein comprising at least one antibody fragment comprising a variable region of a light chain and at least one antibody fragment comprising a variable region of a heavy chain, wherein the light and heavy chain variable regions are contiguously linked, e.g., via a synthetic linker, e.g., a short flexible polypeptide linker, and capable of being expressed as a single chain polypeptide, and wherein the scFv retains the specificity of the intact antibody from which it is derived. Unless specified, as used herein an scFv may have the VL and VH variable regions in either order, e.g., with respect to the N-terminal and C-terminal ends of the polypeptide, the scFv may comprise VL-linker-VH or may comprise VH-linker-VL.

[0079] The portion of the CAR of the invention comprising an antibody or antibody fragment thereof may exist in a variety of forms where the antigen binding domain is expressed as part of a contiguous polypeptide chain including, for example, a single domain antibody fragment (sdAb), a single chain antibody (scFv), a humanized antibody or bispecific antibody (Harlow et al., 1999, In: Using Antibodies: A Laboratory Manual, Cold Spring Harbor Laboratory Press, NY; Harlow et al., 1989, In: Antibodies: A Laboratory Manual, Cold Spring Harbor, N.Y.; Houston et al., 1988, Proc. Natl. Acad. Sci. USA 85:5879-5883; Bird et al., 1988, Science 242:423-426). In one aspect, the antigen binding domain of a CAR composition of the invention comprises an antibody fragment. In a further aspect, the CAR comprises an antibody fragment that comprises a scFv. The precise amino acid sequence boundaries of a given CDR can be determined using any of a number of well-known schemes, including those described by Kabat et al. (1991), “Sequences of Proteins of Immunological Interest,” 5th Ed. Public Health Service, National Institutes of Health, Bethesda, Md. (“Kabat” numbering scheme), A1-Lazikani et al., (1997) JMB 273, 927-948 (“Chothia” numbering scheme), or a combination thereof.

[0080] As used herein, the term “binding domain” or “antibody molecule” refers to a protein, e.g., an immunoglobulin chain or fragment thereof, comprising at least one immunoglobulin variable domain sequence. The term “binding domain” or “antibody molecule” encompasses antibodies and antibody fragments. In an embodiment, an antibody molecule is a multispecific antibody molecule, e.g., it comprises a plurality of immunoglobulin variable domain sequences, wherein a first immunoglobulin variable domain sequence of the plurality has binding specificity for a first epitope and a second immunoglobulin variable domain sequence of the plurality has binding specificity for a second epitope. In an embodiment, a multispecific antibody molecule is a bispecific antibody molecule. A bispecific antibody has specificity for no more than two antigens. A bispecific antibody molecule is characterized by a first immunoglobulin variable domain sequence which has binding specificity for a first epitope and a second immunoglobulin variable domain sequence that has binding specificity for a second epitope.

[0081] The portion of the CAR of the invention comprising an antibody or antibody fragment thereof may exist in a variety of forms where the antigen binding domain is expressed as part of a contiguous polypeptide chain including, for example, a single domain antibody fragment (sdAb), a single chain antibody (scFv), a humanized antibody, or bispecific antibody (Harlow et al., 1999, In: Using Antibodies: A Laboratory Manual, Cold Spring Harbor Laboratory Press, NY; Harlow et al., 1989, In: Antibodies: A Laboratory Manual, Cold Spring Harbor, N.Y.; Houston et al., 1988, Proc. Natl. Acad. Sci. USA 85:5879-5883; Bird et al., 1988, Science 242:423-426). In one aspect, the antigen binding domain of a CAR composition of the invention comprises an antibody fragment. In a further aspect, the CAR comprises an antibody fragment that comprises a scFv.

[0082] The term “antibody heavy chain,” refers to the larger of the two types of polypeptide chains present in antibody molecules in their naturally occurring conformations, and which normally determines the class to which the antibody belongs.

[0083] The term “antibody light chain,” refers to the smaller of the two types of polypeptide chains present in antibody molecules in their naturally occurring conformations. Kappa (κ) and lambda (λ) light chains refer to the two major antibody light chain isotypes.

[0084] The term “recombinant antibody” refers to an antibody which is generated using recombinant DNA technology, such as, for example, an antibody expressed by a bacteriophage or yeast expression system. The term should also be construed to mean an antibody which has been generated by the synthesis of a DNA molecule encoding the antibody and which DNA molecule expresses an antibody protein, or an amino acid sequence specifying the antibody, wherein the DNA or amino acid sequence has been obtained using recombinant DNA or amino acid sequence technology which is available and well known in the art.

[0085] The term “antigen” or “Ag” refers to a molecule that provokes an immune response. This immune response may involve either antibody production, or the activation of specific immunologically-competent cells, or both. The skilled artisan will understand that any macromolecule, including virtually all proteins or peptides, can serve as an antigen. Furthermore, antigens can be derived from recombinant or genomic DNA. A skilled artisan will understand that any DNA, which comprises a nucleotide sequences or a partial nucleotide sequence encoding a protein that elicits an immune response therefore encodes an “antigen” as that term is used herein. Furthermore, one skilled in the art will understand that an antigen need not be encoded solely by a full length nucleotide sequence of a gene. It is readily apparent that the present invention includes, but is not limited to, the use of partial nucleotide sequences of more than one gene and that these nucleotide sequences are arranged in various combinations to encode polypeptides that elicit the desired immune response. Moreover, a skilled artisan will understand that an antigen need not be encoded by a “gene” at all. It is readily apparent that an antigen can be generated synthesized or can be derived from a biological sample, or might be macromolecule besides a polypeptide. Such a biological sample can include, but is not limited to a tissue sample, a tumor sample, a cell or a fluid with other biological components.

[0086] The term “anti-cancer effect” refers to a biological effect which can be manifested by various means, including but not limited to, e.g., a decrease in tumor volume, a decrease in the number of cancer cells, a decrease in the number of metastases, an increase in life expectancy, decrease in cancer cell proliferation, decrease in cancer cell survival, or amelioration of various physiological symptoms associated with the cancerous condition. An “anti-cancer effect” can also be manifested by the ability of the peptides, polynucleotides, cells and antibodies in prevention of the occurrence of cancer in the first place. The term “anti-tumor effect” refers to a biological effect which can be manifested by various means, including but not limited to, e.g., a decrease in tumor volume, a decrease in the number of tumor cells, a decrease in tumor cell proliferation, or a decrease in tumor cell survival.

[0087] The term “autologous” refers to any material derived from the same individual to whom it is later to be re-introduced into the individual.

[0088] The term “allogeneic” refers to any material derived from a different animal of the same species as the individual to whom the material is introduced. Two or more individuals are said to be allogeneic to one another when the genes at one or more loci are not identical. In some aspects, allogeneic material from individuals of the same species may be sufficiently unlike genetically to interact antigenically

[0089] The term “xenogeneic” refers to a graft derived from an animal of a different species.

[0090] The term “cancer” refers to a disease characterized by the uncontrolled growth of aberrant cells. Cancer cells can spread locally or through the bloodstream and lymphatic system to other parts of the body. Examples of various cancers are described herein and include but are not limited to, breast cancer, prostate cancer, ovarian cancer, cervical cancer, skin cancer, pancreatic cancer, colorectal cancer, renal cancer, liver cancer, brain cancer, lymphoma, leukemia, lung cancer and the like. The terms “tumor” and “cancer” are used interchangeably herein, e.g., both terms encompass solid and liquid, e.g., diffuse or circulating, tumors. As used herein, the term “cancer” or “tumor” includes premalignant, as well as malignant cancers and tumors.

[0091] “Derived from” as that term is used herein, indicates a relationship between a first and a second molecule. It generally refers to structural similarity between the first molecule and a second molecule and does not connotate or include a process or source limitation on a first molecule that is derived from a second molecule. For example, in the case of an intracellular signaling domain that is derived from a CD3zeta molecule, the intracellular signaling domain retains sufficient CD3zeta structure such that is has the required function, namely, the ability to generate a signal under the appropriate conditions. It does not connotate or include a limitation to a particular process of producing the intracellular signaling domain, e.g., it does not mean that, to provide the intracellular signaling domain, one must start with a CD3zeta sequence and delete unwanted sequence, or impose mutations, to arrive at the intracellular signaling domain.

[0092] The phrase “disease associated with expression of a tumor antigen as described herein” includes, but is not limited to, a disease associated with expression of a tumor antigen as described herein or condition associated with cells which express a tumor antigen as described herein including, e.g., proliferative diseases such as a cancer or malignancy or a precancerous condition such as a myelodysplasia, a myelodysplastic syndrome or a preleukemia; or a noncancer related indication associated with cells which express a tumor antigen as described herein. In one aspect, a cancer associated with expression of a tumor antigen as described herein is a hematological cancer. In one aspect, a cancer associated with expression of a tumor antigen as described herein is a solid cancer. Further diseases associated with expression of a tumor antigen described herein include, but not limited to, e.g., atypical and/or non-classical cancers, malignancies, precancerous conditions or proliferative diseases associated with expression of a tumor antigen as described herein. Non-cancer related indications associated with expression of a tumor antigen as described herein include, but are not limited to, e.g., autoimmune disease, (e.g., lupus), inflammatory disorders (allergy and asthma) and transplantation. In some embodiments, the tumor antigen-expressing cells express, or at any time expressed, mRNA encoding the tumor antigen. In an embodiment, the tumor antigen-expressing cells produce the tumor antigen protein (e.g., wild-type or mutant), and the tumor antigen protein may be present at normal levels or reduced levels. In an embodiment, the tumor antigen-expressing cells produced detectable levels of a tumor antigen protein at one point, and subsequently produced substantially no detectable tumor antigen protein.

[0093] The term “conservative sequence modifications” refers to amino acid modifications that do not significantly affect or alter the binding characteristics of the antibody or antibody fragment containing the amino acid sequence. Such conservative modifications include amino acid substitutions, additions and deletions. Modifications can be introduced into an antibody or antibody fragment of the invention by standard techniques known in the art, such as site-directed mutagenesis and PCR-mediated mutagenesis. Conservative amino acid substitutions are ones in which the amino acid residue is replaced with an amino acid residue having a similar side chain. Families of amino acid residues having similar side chains have been defined in the art. These families include amino acids with basic side chains (e.g., lysine, arginine, histidine), acidic side chains (e.g., aspartic acid, glutamic acid), uncharged polar side chains (e.g., glycine, asparagine, glutamine, serine, threonine, tyrosine, cysteine, tryptophan), nonpolar side chains (e.g., alanine, valine, leucine, isoleucine, proline, phenylalanine, methionine), beta-branched side chains (e.g., threonine, valine, isoleucine) and aromatic side chains (e.g., tyrosine, phenylalanine, tryptophan, histidine). Thus, one or more amino acid residues within a CAR of the invention can be replaced with other amino acid residues from the same side chain family and the altered CAR can be tested using the functional assays described herein.

[0094] The term “stimulation,” refers to a primary response induced by binding of a stimulatory molecule (e.g., a TCR/CD3 complex or CAR) with its cognate ligand (or tumor antigen in the case of a CAR) thereby mediating a signal transduction event, such as, but not limited to, signal transduction via the TCR/CD3 complex or signal transduction via the appropriate NK receptor or signaling domains of the CAR. Stimulation can mediate altered expression of certain molecules.

[0095] The term “stimulatory molecule,” refers to a molecule expressed by an immune cell (e.g., T cell, NK cell, B cell) that provides the cytoplasmic signaling sequence(s) that regulate activation of the immune cell in a stimulatory way for at least some aspect of the immune cell signaling pathway. In one aspect, the signal is a primary signal that is initiated by, for instance, binding of a TCR/CD3 complex with an MHC molecule loaded with peptide, and which leads to mediation of a T cell response, including, but not limited to, proliferation, activation, differentiation, and the like. A primary cytoplasmic signaling sequence (also referred to as a “primary signaling domain”) that acts in a stimulatory manner may contain a signaling motif which is known as immunoreceptor tyrosine-based activation motif or ITAM. Examples of an ITAM containing cytoplasmic signaling sequence that is of particular use in the invention includes, but is not limited to, those derived from CD3 zeta, common FcR gamma (FCER1G), Fc gamma RIIa, FcR beta (Fc Epsilon Rib), CD3 gamma, CD3 delta, CD3 epsilon, CD79a, CD79b, DAP10, and DAP12. In a specific CAR of the invention, the intracellular signaling domain in any one or more CARS of the invention comprises an intracellular signaling sequence, e.g., a primary signaling sequence of CD3-zeta. In a specific CAR of the invention, the primary signaling sequence of CD3-zeta is the sequence provided as SEQ ID NO:18, or the equivalent residues from a non-human species, e.g., mouse, rodent, monkey, ape and the like. In a specific CAR of the invention, the primary signaling sequence of CD3-zeta is the sequence as provided in SEQ ID NO: 20, or the equivalent residues from a non-human species, e.g., mouse, rodent, monkey, ape and the like.

[0096] The term “antigen presenting cell” or “APC” refers to an immune system cell such as an accessory cell (e.g., a B-cell, a dendritic cell, and the like) that displays a foreign antigen complexed with major histocompatibility complexes (MHC's) on its surface. T-cells may recognize these complexes using their T-cell receptors (TCRs). APCs process antigens and present them to T-cells.

[0097] An “intracellular signaling domain,” as the term is used herein, refers to an intracellular portion of a molecule. The intracellular signaling domain generates a signal that promotes an immune effector function of the CAR containing cell, e.g., a CART cell. Examples of immune effector function, e.g., in a CART cell, include cytolytic activity and helper activity, including the secretion of cytokines.

[0098] In an embodiment, the intracellular signaling domain can comprise a primary intracellular signaling domain. Exemplary primary intracellular signaling domains include those derived from the molecules responsible for primary stimulation, or antigen dependent simulation. In an embodiment, the intracellular signaling domain can comprise a costimulatory intracellular domain. Exemplary costimulatory intracellular signaling domains include those derived from molecules responsible for costimulatory signals, or antigen independent stimulation. For example, in the case of a CART, a primary intracellular signaling domain can comprise a cytoplasmic sequence of a T cell receptor, and a costimulatory intracellular signaling domain can comprise cytoplasmic sequence from co-receptor or costimulatory molecule.

[0099] A primary intracellular signaling domain can comprise a signaling motif which is known as an immunoreceptor tyrosine-based activation motif or ITAM. Examples of ITAM containing primary cytoplasmic signaling sequences include, but are not limited to, those derived from CD3 zeta, common FcR gamma (FCER1G), Fc gamma RIIa, FcR beta (Fc Epsilon Rib), CD3 gamma, CD3 delta, CD3 epsilon, CD79a, CD79b, DAP10, and DAP12.

[0100] The term “zeta” or alternatively “zeta chain”, “CD3-zeta” or “TCR-zeta” is defined as the protein provided as GenBan Acc. No. BAG36664.1, or the equivalent residues from a non-human species, e.g., mouse, rodent, monkey, ape and the like, and a “zeta stimulatory domain” or alternatively a “CD3-zeta stimulatory domain” or a “TCR-zeta stimulatory domain” is defined as the amino acid residues from the cytoplasmic domain of the zeta chain, or functional derivatives thereof, that are sufficient to functionally transmit an initial signal necessary for T cell activation. In one aspect the cytoplasmic domain of zeta comprises residues 52 through 164 of GenBank Acc. No. BAG36664.1 or the equivalent residues from a non-human species, e.g., mouse, rodent, monkey, ape and the like, that are functional orthologs thereof. In one aspect, the “zeta stimulatory domain” or a “CD3-zeta stimulatory domain” is the sequence provided as SEQ ID NO: 18. In one aspect, the “zeta stimulatory domain” or a “CD3-zeta stimulatory domain” is the sequence provided as SEQ ID NO: 20.

[0101] The term a “costimulatory molecule” refers to a cognate binding partner on a T cell that specifically binds with a costimulatory ligand, thereby mediating a costimulatory response by the T cell, such as, but not limited to, proliferation. Costimulatory molecules are cell surface molecules other than antigen receptors or their ligands that are contribute to an efficient immune response. Costimulatory molecules include, but are not limited to an MHC class I molecule, BTLA and a Toll ligand receptor, as well as OX40, CD27, CD28, CDS, ICAM-1, LFA-1 (CD11a/CD18), ICOS (CD278), and 4-1BB (CD137). Further examples of such costimulatory molecules include CDS, ICAM-1, GITR, BAFFR, HVEM (LIGHTR), SLAMF7, NKp80 (KLRF1), NKp44, NKp30, NKp46, CD160, CD19, CD4, CD8alpha, CD8beta, IL2R beta, IL2R gamma, IL7R alpha, ITGA4, VLA1, CD49a, ITGA4, IA4, CD49D, ITGA6, VLA-6, CD49f, ITGAD, CD11d, ITGAE, CD103, ITGAL, CD11a, LFA-1, ITGAM, CD11b, ITGAX, CD11c, ITGB1, CD29, ITGB2, CD18, LFA-1, ITGB7, NKG2D, NKG2C, TNFR2, TRANCE/RANKL, DNAM1 (CD226), SLAMF4 (CD244, 2B4), CD84, CD96 (Tactile), CEACAM1, CRTAM, Ly9 (CD229), CD160 (BY55), PSGL1, CD100 (SEMA4D), CD69, SLAMF6 (NTB-A, Ly108), SLAM (SLAMF1, CD150, IPO-3), BLAME (SLAMF8), SELPLG (CD162), LTBR, LAT, GADS, SLP-76, PAG/Cbp, CD19a, and a ligand that specifically binds with CD83.

[0102] A costimulatory intracellular signaling domain can be the intracellular portion of a costimulatory molecule. A costimulatory molecule can be represented in the following protein families: TNF receptor proteins, Immunoglobulin-like proteins, cytokine receptors, integrins, signaling lymphocytic activation molecules (SLAM proteins), and activating NK cell receptors. Examples of such molecules include CD27, CD28, 4-1BB (CD137), OX40, GITR, CD30, CD40, ICOS, BAFFR, HVEM, ICAM-1, lymphocyte function-associated antigen-1 (LFA-1), CD2, CDS, CD7, CD287, LIGHT, NKG2C, NKG2D, SLAMF7, NKp80, NKp30, NKp44, NKp46, CD160, B7-H3, and a ligand that specifically binds with CD83, and the like.

[0103] The intracellular signaling domain can comprise the entire intracellular portion, or the entire native intracellular signaling domain, of the molecule from which it is derived, or a functional fragment or derivative thereof.

[0104] The term “4-1BB” refers to a member of the TNFR superfamily with an amino acid sequence provided as GenBank Acc. No. AAA62478.2, or the equivalent residues from a non-human species, e.g., mouse, rodent, monkey, ape and the like; and a “4-1BB costimulatory domain” is defined as amino acid residues 214-255 of GenBank Acc. No. AAA62478.2, or the equivalent residues from a non-human species, e.g., mouse, rodent, monkey, ape and the like. In one aspect, the “4-1BB costimulatory domain” is the sequence provided as SEQ ID NO: 14 or the equivalent residues from a non-human species, e.g., mouse, rodent, monkey, ape and the like.

[0105] “Immune effector cell,” as that term is used herein, refers to a cell that is involved in an immune response, e.g., in the promotion of an immune effector response. Examples of immune effector cells include T cells, e.g., alpha/beta T cells and gamma/delta T cells, B cells, natural killer (NK) cells, natural killer T (NKT) cells, mast cells, and myeloic-derived phagocytes.

[0106] “Immune effector function or immune effector response,” as that term is used herein, refers to function or response, e.g., of an immune effector cell, that enhances or promotes an immune attack of a target cell. E.g., an immune effector function or response refers a property of a T or NK cell that promotes killing or the inhibition of growth or proliferation, of a target cell. In the case of a T cell, primary stimulation and co-stimulation are examples of immune effector function or response.

[0107] The term “encoding” refers to the inherent property of specific sequences of nucleotides in a polynucleotide, such as a gene, a cDNA, or an mRNA, to serve as templates for synthesis of other polymers and macromolecules in biological processes having either a defined sequence of nucleotides (e.g., rRNA, tRNA and mRNA) or a defined sequence of amino acids and the biological properties resulting therefrom. Thus, a gene, cDNA, or RNA, encodes a protein if transcription and translation of mRNA corresponding to that gene produces the protein in a cell or other biological system. Both the coding strand, the nucleotide sequence of which is identical to the mRNA sequence and is usually provided in sequence listings, and the non-coding strand, used as the template for transcription of a gene or cDNA, can be referred to as encoding the protein or other product of that gene or cDNA.

[0108] Unless otherwise specified, a “nucleotide sequence encoding an amino acid sequence” includes all nucleotide sequences that are degenerate versions of each other and that encode the same amino acid sequence. The phrase nucleotide sequence that encodes a protein or a RNA may also include introns to the extent that the nucleotide sequence encoding the protein may in some version contain an intron(s).

[0109] The term “effective amount” or “therapeutically effective amount” are used interchangeably herein, and refer to an amount of a compound, formulation, material, or composition, as described herein effective to achieve a particular biological result.

[0110] The term “endogenous” refers to any material from or produced inside an organism, cell, tissue or system.

[0111] The term “exogenous” refers to any material introduced from or produced outside an organism, cell, tissue or system.

[0112] The term “expression” refers to the transcription and/or translation of a particular nucleotide sequence driven by a promoter.

[0113] The term “transfer vector” refers to a composition of matter which comprises an isolated nucleic acid and which can be used to deliver the isolated nucleic acid to the interior of a cell. Numerous vectors are known in the art including, but not limited to, linear polynucleotides, polynucleotides associated with ionic or amphiphilic compounds, plasmids, and viruses. Thus, the term “transfer vector” includes an autonomously replicating plasmid or a virus. The term should also be construed to further include non-plasmid and non-viral compounds which facilitate transfer of nucleic acid into cells, such as, for example, a polylysine compound, liposome, and the like. Examples of viral transfer vectors include, but are not limited to, adenoviral vectors, adeno-associated virus vectors, retroviral vectors, lentiviral vectors, and the like.

[0114] The term “expression vector” refers to a vector comprising a recombinant polynucleotide comprising expression control sequences operatively linked to a nucleotide sequence to be expressed. An expression vector comprises sufficient cis-acting elements for expression; other elements for expression can be supplied by the host cell or in an in vitro expression system. Expression vectors include all those known in the art, including cosmids, plasmids (e.g., naked or contained in liposomes) and viruses (e.g., lentiviruses, retroviruses, adenoviruses, and adeno-associated viruses) that incorporate the recombinant polynucleotide.

[0115] The term “lentivirus” refers to a genus of the Retroviridae family. Lentiviruses are unique among the retroviruses in being able to infect non-dividing cells; they can deliver a significant amount of genetic information into the DNA of the host cell, so they are one of the most efficient methods of a gene delivery vector. HIV, SIV, and FIV are all examples of lentiviruses.

[0116] The term “lentiviral vector” refers to a vector derived from at least a portion of a lentivirus genome, including especially a self-inactivating lentiviral vector as provided in Milone et al., Mol. Ther. 17(8): 1453-1464 (2009). Other examples of lentivirus vectors that may be used in the clinic, include but are not limited to, e.g., the LENTIVECTOR® gene delivery technology from Oxford BioMedica, the LENTIMAX™ vector system from Lentigen and the like. Nonclinical types of lentiviral vectors are also available and would be known to one skilled in the art.

[0117] The term “homologous” or “identity” refers to the subunit sequence identity between two polymeric molecules, e.g., between two nucleic acid molecules, such as, two DNA molecules or two RNA molecules, or between two polypeptide molecules. When a subunit position in both of the two molecules is occupied by the same monomeric subunit; e.g., if a position in each of two DNA molecules is occupied by adenine, then they are homologous or identical at that position. The homology between two sequences is a direct function of the number of matching or homologous positions; e.g., if half (e.g., five positions in a polymer ten subunits in length) of the positions in two sequences are homologous, the two sequences are 50% homologous; if 90% of the positions (e.g., 9 of 10), are matched or homologous, the two sequences are 90% homologous.

[0118] “Humanized” forms of non-human (e.g., murine) antibodies are chimeric immunoglobulins, immunoglobulin chains or fragments thereof (such as Fv, Fab, Fab′, F(ab′)2 or other antigen-binding subsequences of antibodies) which contain minimal sequence derived from non-human immunoglobulin. For the most part, humanized antibodies and antibody fragments thereof are human immunoglobulins (recipient antibody or antibody fragment) in which residues from a complementary-determining region (CDR) of the recipient are replaced by residues from a CDR of a non-human species (donor antibody) such as mouse, rat or rabbit having the desired specificity, affinity, and capacity. In some instances, Fv framework region (FR) residues of the human immunoglobulin are replaced by corresponding non-human residues. Furthermore, a humanized antibody/antibody fragment can comprise residues which are found neither in the recipient antibody nor in the imported CDR or framework sequences. These modifications can further refine and optimize antibody or antibody fragment performance. In general, the humanized antibody or antibody fragment thereof will comprise substantially all of at least one, and typically two, variable domains, in which all or substantially all of the CDR regions correspond to those of a non-human immunoglobulin and all or a significant portion of the FR regions are those of a human immunoglobulin sequence. The humanized antibody or antibody fragment can also comprise at least a portion of an immunoglobulin constant region (Fc), typically that of a human immunoglobulin. For further details, see Jones et al., Nature, 321: 522-525, 1986; Reichmann et al., Nature, 332: 323-329, 1988; Presta, Curr. Op. Struct. Biol., 2: 593-596, 1992.

[0119] “Fully human” refers to an immunoglobulin, such as an antibody or antibody fragment, where the whole molecule is of human origin or consists of an amino acid sequence identical to a human form of the antibody or immunoglobulin.

[0120] The term “isolated” means altered or removed from the natural state. For example, a nucleic acid or a peptide naturally present in a living animal is not “isolated,” but the same nucleic acid or peptide partially or completely separated from the coexisting materials of its natural state is “isolated.” An isolated nucleic acid or protein can exist in substantially purified form, or can exist in a non-native environment such as, for example, a host cell.

[0121] In the context of the present invention, the following abbreviations for the commonly occurring nucleic acid bases are used. “A” refers to adenosine, “C” refers to cytosine, “G” refers to guanosine, “T” refers to thymidine, and “U” refers to uridine.

[0122] The term “operably linked” or “transcriptional control” refers to functional linkage between a regulatory sequence and a heterologous nucleic acid sequence resulting in expression of the latter. For example, a first nucleic acid sequence is operably linked with a second nucleic acid sequence when the first nucleic acid sequence is placed in a functional relationship with the second nucleic acid sequence. For instance, a promoter is operably linked to a coding sequence if the promoter affects the transcription or expression of the coding sequence. Operably linked DNA sequences can be contiguous with each other and, e.g., where necessary to join two protein coding regions, are in the same reading frame.

[0123] The term “parenteral” administration of an immunogenic composition includes, e.g., subcutaneous (s.c.), intravenous (i.v.), intramuscular (i.m.), or intrasternal injection, intratumoral, or infusion techniques.

[0124] The term “nucleic acid” or “polynucleotide” refers to deoxyribonucleic acids (DNA) or ribonucleic acids (RNA) and polymers thereof in either single- or double-stranded form. Unless specifically limited, the term encompasses nucleic acids containing known analogues of natural nucleotides that have similar binding properties as the reference nucleic acid and are metabolized in a manner similar to naturally occurring nucleotides. Unless otherwise indicated, a particular nucleic acid sequence also implicitly encompasses conservatively modified variants thereof (e.g., degenerate codon substitutions), alleles, orthologs, SNPs, and complementary sequences as well as the sequence explicitly indicated. Specifically, degenerate codon substitutions may be achieved by generating sequences in which the third position of one or more selected (or all) codons is substituted with mixed-base and/or deoxyinosine residues (Batzer et al., Nucleic Acid Res. 19:5081 (1991); Ohtsuka et al., J. Biol. Chem. 260:2605-2608 (1985); and Rossolini et al., Mol. Cell. Probes 8:91-98 (1994)).

[0125] The terms “peptide,” “polypeptide,” and “protein” are used interchangeably, and refer to a compound comprised of amino acid residues covalently linked by peptide bonds. A protein or peptide must contain at least two amino acids, and no limitation is placed on the maximum number of amino acids that can comprise a protein's or peptide's sequence. Polypeptides include any peptide or protein comprising two or more amino acids joined to each other by peptide bonds. As used herein, the term refers to both short chains, which also commonly are referred to in the art as peptides, oligopeptides and oligomers, for example, and to longer chains, which generally are referred to in the art as proteins, of which there are many types. “Polypeptides” include, for example, biologically active fragments, substantially homologous polypeptides, oligopeptides, homodimers, heterodimers, variants of polypeptides, modified polypeptides, derivatives, analogs, fusion proteins, among others. A polypeptide includes a natural peptide, a recombinant peptide, or a combination thereof.

[0126] The term “promoter” refers to a DNA sequence recognized by the synthetic machinery of the cell, or introduced synthetic machinery, required to initiate the specific transcription of a polynucleotide sequence.

[0127] The term “promoter/regulatory sequence” refers to a nucleic acid sequence which is required for expression of a gene product operably linked to the promoter/regulatory sequence. In some instances, this sequence may be the core promoter sequence and in other instances, this sequence may also include an enhancer sequence and other regulatory elements which are required for expression of the gene product. The promoter/regulatory sequence may, for example, be one which expresses the gene product in a tissue specific manner.

[0128] The term “constitutive” promoter refers to a nucleotide sequence which, when operably linked with a polynucleotide which encodes or specifies a gene product, causes the gene product to be produced in a cell under most or all physiological conditions of the cell.

[0129] The term “inducible” promoter refers to a nucleotide sequence which, when operably linked with a polynucleotide which encodes or specifies a gene product, causes the gene product to be produced in a cell substantially only when an inducer which corresponds to the promoter is present in the cell.

[0130] The term “tissue-specific” promoter refers to a nucleotide sequence which, when operably linked with a polynucleotide encodes or specified by a gene, causes the gene product to be produced in a cell substantially only if the cell is a cell of the tissue type corresponding to the promoter.

[0131] The terms “cancer associated antigen” or “tumor antigen” interchangeably refers to a molecule (typically a protein, carbohydrate or lipid) that is expressed on the surface of a cancer cell, either entirely or as a fragment (e.g., MHC/peptide), and which is useful for the preferential targeting of a pharmacological agent to the cancer cell. In some embodiments, a tumor antigen is a marker expressed by both normal cells and cancer cells, e.g., a lineage marker, e.g., CD19 on B cells. In some embodiments, a tumor antigen is a cell surface molecule that is overexpressed in a cancer cell in comparison to a normal cell, for instance, 1-fold over expression, 2-fold overexpression, 3-fold overexpression or more in comparison to a normal cell. In some embodiments, a tumor antigen is a cell surface molecule that is inappropriately synthesized in the cancer cell, for instance, a molecule that contains deletions, additions or mutations in comparison to the molecule expressed on a normal cell. In some embodiments, a tumor antigen will be expressed exclusively on the cell surface of a cancer cell, entirely or as a fragment (e.g., MHC/peptide), and not synthesized or expressed on the surface of a normal cell. In some embodiments, the CARs of the present invention includes CARs comprising an antigen binding domain (e.g., antibody or antibody fragment) that binds to a MHC presented peptide. Normally, peptides derived from endogenous proteins fill the pockets of Major histocompatibility complex (MHC) class I molecules, and are recognized by T cell receptors (TCRs) on CD8+T lymphocytes. The MHC class I complexes are constitutively expressed by all nucleated cells. In cancer, virus-specific and/or tumor-specific peptide/MHC complexes represent a unique class of cell surface targets for immunotherapy. TCR-like antibodies targeting peptides derived from viral or tumor antigens in the context of human leukocyte antigen (HLA)-A1 or HLA-A2 have been described (see, e.g., Sastry et al., J Virol. 2011 85(5):1935-1942; Sergeeva et al., Blood, 2011 117(16):4262-4272; Verma et al., J Immunol 2010 184(4):2156-2165; Willemsen et al., Gene Ther 2001 8(21):1601-1608; Dao et al., Sci Transl Med 2013 5(176):176ra33; Tassev et al., Cancer Gene Ther 2012 19(2):84-100). For example, TCR-like antibody can be identified from screening a library, such as a human scFv phage displayed library.

[0132] The term “tumor-supporting antigen” or “cancer-supporting antigen” interchangeably refer to a molecule (typically a protein, carbohydrate or lipid) that is expressed on the surface of a cell that is, itself, not cancerous, but supports the cancer cells, e.g., by promoting their growth or survival e.g., resistance to immune cells. Exemplary cells of this type include stromal cells and myeloid-derived suppressor cells (MDSCs). The tumor-supporting antigen itself need not play a role in supporting the tumor cells so long as the antigen is present on a cell that supports cancer cells.

[0133] The term “flexible polypeptide linker” or “linker” as used in the context of a scFv refers to a peptide linker that consists of amino acids such as glycine and/or serine residues used alone or in combination, to link variable heavy and variable light chain regions together. In one embodiment, the flexible polypeptide linker is a Gly/Ser linker and comprises the amino acid sequence (Gly-Gly-Gly-Ser)n, where n is a positive integer equal to or greater than 1. For example, n=1, n=2, n=3. n=4, n=5 and n=6, n=7, n=8, n=9 and n=10 (SEQ ID NO:28). In one embodiment, the flexible polypeptide linkers include, but are not limited to, (Gly4 Ser)4 (SEQ ID NO:29) or (Gly4 Ser)3 (SEQ ID NO:30). In another embodiment, the linkers include multiple repeats of (Gly2Ser), (GlySer) or (Gly3Ser) (SEQ ID NO:31). Also included within the scope of the invention are linkers described in WO2012/138475, incorporated herein by reference).

[0134] As used herein, a 5′ cap (also termed an RNA cap, an RNA 7-methylguanosine cap or an RNA m⁷G cap) is a modified guanine nucleotide that has been added to the “front” or 5′ end of a eukaryotic messenger RNA shortly after the start of transcription. The 5′ cap consists of a terminal group which is linked to the first transcribed nucleotide. Its presence is critical for recognition by the ribosome and protection from RNases. Cap addition is coupled to transcription, and occurs co-transcriptionally, such that each influences the other. Shortly after the start of transcription, the 5′ end of the mRNA being synthesized is bound by a cap-synthesizing complex associated with RNA polymerase. This enzymatic complex catalyzes the chemical reactions that are required for mRNA capping. Synthesis proceeds as a multi-step biochemical reaction. The capping moiety can be modified to modulate functionality of mRNA such as its stability or efficiency of translation.

[0135] As used herein, “in vitro transcribed RNA” refers to RNA, preferably mRNA, that has been synthesized in vitro. Generally, the in vitro transcribed RNA is generated from an in vitro transcription vector. The in vitro transcription vector comprises a template that is used to generate the in vitro transcribed RNA.

[0136] As used herein, a “poly(A)” is a series of adenosines attached by polyadenylation to the mRNA. In the preferred embodiment of a construct for transient expression, the polyA is between 50 and 5000 (SEQ ID NO: 34), preferably greater than 64, more preferably greater than 100, most preferably greater than 300 or 400. poly(A) sequences can be modified chemically or enzymatically to modulate mRNA functionality such as localization, stability or efficiency of translation.

[0137] As used herein, “polyadenylation” refers to the covalent linkage of a polyadenylyl moiety, or its modified variant, to a messenger RNA molecule. In eukaryotic organisms, most messenger RNA (mRNA) molecules are polyadenylated at the 3′ end. The 3′ poly(A) tail is a long sequence of adenine nucleotides (often several hundred) added to the pre-mRNA through the action of an enzyme, polyadenylate polymerase. In higher eukaryotes, the poly(A) tail is added onto transcripts that contain a specific sequence, the polyadenylation signal. The poly(A) tail and the protein bound to it aid in protecting mRNA from degradation by exonucleases. Polyadenylation is also important for transcription termination, export of the mRNA from the nucleus, and translation. Polyadenylation occurs in the nucleus immediately after transcription of DNA into RNA, but additionally can also occur later in the cytoplasm. After transcription has been terminated, the mRNA chain is cleaved through the action of an endonuclease complex associated with RNA polymerase. The cleavage site is usually characterized by the presence of the base sequence AAUAAA near the cleavage site. After the mRNA has been cleaved, adenosine residues are added to the free 3′ end at the cleavage site.

[0138] As used herein, “transient” refers to expression of a non-integrated transgene for a period of hours, days or weeks, wherein the period of time of expression is less than the period of time for expression of the gene if integrated into the genome or contained within a stable plasmid replicon in the host cell.

[0139] As used herein, the terms “treat”, “treatment” and “treating” refer to the reduction or amelioration of the progression, severity and/or duration of a proliferative disorder, or the amelioration of one or more symptoms (preferably, one or more discernible symptoms) of a proliferative disorder resulting from the administration of one or more therapies (e.g., one or more therapeutic agents such as a CAR of the invention). In specific embodiments, the terms “treat”, “treatment” and “treating” refer to the amelioration of at least one measurable physical parameter of a proliferative disorder, such as growth of a tumor, not necessarily discernible by the patient. In other embodiments the terms “treat”, “treatment” and “treating”-refer to the inhibition of the progression of a proliferative disorder, either physically by, e.g., stabilization of a discernible symptom, physiologically by, e.g., stabilization of a physical parameter, or both. In other embodiments the terms “treat”, “treatment” and “treating” refer to the reduction or stabilization of tumor size or cancerous cell count.

[0140] The term “signal transduction pathway” refers to the biochemical relationship between a variety of signal transduction molecules that play a role in the transmission of a signal from one portion of a cell to another portion of a cell. The phrase “cell surface receptor” includes molecules and complexes of molecules capable of receiving a signal and transmitting signal across the membrane of a cell.

[0141] The term “subject” is intended to include living organisms in which an immune response can be elicited (e.g., mammals, human).

[0142] The term, a “substantially purified” cell refers to a cell that is essentially free of other cell types. A substantially purified cell also refers to a cell which has been separated from other cell types with which it is normally associated in its naturally occurring state. In some instances, a population of substantially purified cells refers to a homogenous population of cells. In other instances, this term refers simply to cell that have been separated from the cells with which they are naturally associated in their natural state. In some aspects, the cells are cultured in vitro. In other aspects, the cells are not cultured in vitro.

[0143] The term “therapeutic” as used herein means a treatment. A therapeutic effect is obtained by reduction, suppression, remission, or eradication of a disease state.

[0144] The term “prophylaxis” as used herein means the prevention of or protective treatment for a disease or disease state.

[0145] In the context of the present invention, “tumor antigen” or “hyperproliferative disorder antigen” or “antigen associated with a hyperproliferative disorder” refers to antigens that are common to specific hyperproliferative disorders. In certain aspects, the hyperproliferative disorder antigens of the present invention are derived from, cancers including but not limited to primary or metastatic melanoma, thymoma, lymphoma, sarcoma, lung cancer, liver cancer, non-Hodgkin lymphoma, Hodgkin lymphoma, leukemias, uterine cancer, cervical cancer, bladder cancer, kidney cancer and adenocarcinomas such as breast cancer, prostate cancer, ovarian cancer, pancreatic cancer, and the like.

[0146] The term “transfected” or “transformed” or “transduced” refers to a process by which exogenous nucleic acid is transferred or introduced into the host cell. A “transfected” or “transformed” or “transduced” cell is one which has been transfected, transformed or transduced with exogenous nucleic acid. The cell includes the primary subject cell and its progeny.

[0147] The term “specifically binds,” refers to an antibody, or a ligand, which recognizes and binds with a binding partner (e.g., a tumor antigen) protein present in a sample, but which antibody or ligand does not substantially recognize or bind other molecules in the sample.

[0148] “Regulatable chimeric antigen receptor (RCAR),” as that term is used herein, refers to a set of polypeptides, typically two in the simplest embodiments, which when in a RCARX cell, provides the RCARX cell with specificity for a target cell, typically a cancer cell, and with regulatable intracellular signal generation or proliferation, which can optimize an immune effector property of the RCARX cell. An RCARX cell relies at least in part, on an antigen binding domain to provide specificity to a target cell that comprises the antigen bound by the antigen binding domain. In an embodiment, an RCAR includes a dimerization switch that, upon the presence of a dimerization molecule, can couple an intracellular signaling domain to the antigen binding domain.

[0149] “Membrane anchor” or “membrane tethering domain”, as that term is used herein, refers to a polypeptide or moiety, e.g., a myristoyl group, sufficient to anchor an extracellular or intracellular domain to the plasma membrane.

[0150] “Switch domain,” as that term is used herein, e.g., when referring to an RCAR, refers to an entity, typically a polypeptide-based entity, that, in the presence of a dimerization molecule, associates with another switch domain. The association results in a functional coupling of a first entity linked to, e.g., fused to, a first switch domain, and a second entity linked to, e.g., fused to, a second switch domain. A first and second switch domain are collectively referred to as a dimerization switch. In embodiments, the first and second switch domains are the same as one another, e.g., they are polypeptides having the same primary amino acid sequence, and are referred to collectively as a homodimerization switch. In embodiments, the first and second switch domains are different from one another, e.g., they are polypeptides having different primary amino acid sequences, and are referred to collectively as a heterodimerization switch. In embodiments, the switch is intracellular. In embodiments, the switch is extracellular. In embodiments, the switch domain is a polypeptide-based entity, e.g., FKBP or FRB-based, and the dimerization molecule is small molecule, e.g., a rapalogue. In embodiments, the switch domain is a polypeptide-based entity, e.g., an scFv that binds a myc peptide, and the dimerization molecule is a polypeptide, a fragment thereof, or a multimer of a polypeptide, e.g., a myc ligand or multimers of a myc ligand that bind to one or more myc scFvs. In embodiments, the switch domain is a polypeptide-based entity, e.g., myc receptor, and the dimerization molecule is an antibody or fragments thereof, e.g., myc antibody.

[0151] “Dimerization molecule,” as that term is used herein, e.g., when referring to an RCAR, refers to a molecule that promotes the association of a first switch domain with a second switch domain. In embodiments, the dimerization molecule does not naturally occur in the subject, or does not occur in concentrations that would result in significant dimerization. In embodiments, the dimerization molecule is a small molecule, e.g., rapamycin or a rapalogue, e.g, RAD001.

[0152] The term “bioequivalent” refers to an amount of an agent other than the reference compound (e.g., RAD001), required to produce an effect equivalent to the effect produced by the reference dose or reference amount of the reference compound (e.g., RAD001). In an embodiment the effect is the level of mTOR inhibition, e.g., as measured by P70 S6 kinase inhibition, e.g., as evaluated in an in vivo or in vitro assay, e.g., as measured by an assay described herein, e.g., the Boulay assay. In an embodiment, the effect is alteration of the ratio of PD-1 positive/PD-1 negative T cells, as measured by cell sorting. In an embodiment a bioequivalent amount or dose of an mTOR inhibitor is the amount or dose that achieves the same level of P70 S6 kinase inhibition as does the reference dose or reference amount of a reference compound. In an embodiment, a bioequivalent amount or dose of an mTOR inhibitor is the amount or dose that achieves the same level of alteration in the ratio of PD-1 positive/PD-1 negative T cells as does the reference dose or reference amount of a reference compound.

[0153] The term “low, immune enhancing, dose” when used in conjunction with an mTOR inhibitor, e.g., an allosteric mTOR inhibitor, e.g., RAD001 or rapamycin, or a catalytic mTOR inhibitor, refers to a dose of mTOR inhibitor that partially, but not fully, inhibits mTOR activity, e.g., as measured by the inhibition of P70 S6 kinase activity. Methods for evaluating mTOR activity, e.g., by inhibition of P70 S6 kinase, are discussed herein. The dose is insufficient to result in complete immune suppression but is sufficient to enhance the immune response. In an embodiment, the low, immune enhancing, dose of mTOR inhibitor results in a decrease in the number of PD-1 positive T cells and/or an increase in the number of PD-1 negative T cells, or an increase in the ratio of PD-1 negative T cells/PD-1 positive T cells. In an embodiment, the low, immune enhancing, dose of mTOR inhibitor results in an increase in the number of naive T cells. In an embodiment, the low, immune enhancing, dose of mTOR inhibitor results in one or more of the following:
[0154] an increase in the expression of one or more of the following markers: CD62^{high}, CD127^{high}, CD27⁺, and BCL2, e.g., on memory T cells, e.g., memory T cell precursors;
[0155] a decrease in the expression of KLRG1, e.g., on memory T cells, e.g., memory T cell precursors; and
[0156] an increase in the number of memory T cell precursors, e.g., cells with any one or combination of the following characteristics: increased CD62^{high} increased CD127^{high} increased CD27+, decreased KLRG1, and increased BCL2;
[0157] wherein any of the changes described above occurs, e.g., at least transiently, e.g., as compared to a non-treated subject.

[0158] “Refractory” as used herein refers to a disease, e.g., cancer, that does not respond to a treatment. In embodiments, a refractory cancer can be resistant to a treatment before or at the beginning of the treatment. In other embodiments, the refractory cancer can become resistant during a treatment. A refractory cancer is also called a resistant cancer.

[0159] “Relapsed” as used herein refers to the return of a disease (e.g., cancer) or the signs and symptoms of a disease such as cancer after a period of improvement, e.g., after prior treatment of a therapy, e.g., cancer therapy

[0160] Ranges: throughout this disclosure, various aspects of the invention can be presented in a range format. It should be understood that the description in range format is merely for convenience and brevity and should not be construed as an inflexible limitation on the scope of the invention. Accordingly, the description of a range should be considered to have specifically disclosed all the possible subranges as well as individual numerical values within that range. For example, description of a range such as from 1 to 6 should be considered to have specifically disclosed subranges such as from 1 to 3, from 1 to 4, from 1 to 5, from 2 to 4, from 2 to 6, from 3 to 6 etc., as well as individual numbers within that range, for example, 1, 2, 2.7, 3, 4, 5, 5.3, and 6. As another example, a range such as 95-99% identity, includes something with 95%, 96%, 97%, 98% or 99% identity, and includes subranges such as 96-99%, 96-98%, 96-97%, 97-99%, 97-98% and 98-99% identity. This applies regardless of the breadth of the range.

[0161] “Tet” as the term is used herein, refers to the family of genes, and the proteins encoded by said genes, of the ten-eleven translocation methylcytosine dioxygenase family. Tet includes, for example, Tet1, Tet2 and Tet3.

[0162] “Tet2” as the term is used herein, refers to gene, tet methylcytosine dioxygenase 2, and the protein encoded by said gene, the tet2 methylcytosine dioxygenase, which catalyzes the conversion of methylcytosine to 5-hydroxymethylcytosine. It is sometimes also referred to as “KIAA1546,” “FLJ20032” and “tet oncogene family member 2” The encoded protein is involved in myelopoiesis, and defects in this gene have been associated with several myeloproliferative disorders. In the human genome, TET2 is located on chromosome 4q24. Currently six TET2 isoforms have been described and their Genebank numbers are: NM_001127208.2; XM_005263082.1; XM_006714242.2; NM_017628.4; XM_011532044.1; and XM_011532043.1.

[0163] An example of the protein sequence of human Tet2 is provided as UniProt accession number Q6N021:

```
[SEQ ID NO: 1357]
                10 20 30 40
MEQDRTNHVE GNRLSPFLIP SPPICQTEPL ATKLQNGSPL
                50 60 70 80
PERAHPEVNG DTKWHSFKSY YGIPCMKGSQ NSRVSPDFTQ
                90 100 110 120
ESRGYSKCLQ NGGIKRTVSE PSLSGLLQIK KLKQDQKANG
              130 140 150 160
ERRNFGVSQE RNPGESSQPN VSDLSDKKES VSSVAQENAV
              170 180 190 200
KDFTSFSTHN CSGPENPELQ ILNEQEGKSA NYHDKNIVLL
              210 220 230 240
KNKAVLMPNG ATVSASSVEH THGELLEKTL SQYYPDCVSI
              250 260 270 280
AVQKTTSHIN AINSQATNEL SCEITHPSHT SGQINSAQTS
              290 300 310 320
NSELPPKPAA VVSEACDADD ADNASKLAAM LNTCSFQKPE
              330 340 350 360
QLQQQKSVFE ICPSPAENNI QGTTKLASGE EFCSGSSSNL
              370 380 390 400
QAPGGSSERY LKQNEMNGAY FKQSSVFTKD SFSATTTPPP
              410 420 430 440
PSQLLLSPPP PLPQVPQLPS EGKSTLNGGV LEEHHHYPNQ
              450 460 470 480
SNTTLLREVK IEGKPEAPPS QSPNPSTHVC SPSPMLSERP
              490 500 510 520
QNNCVNRNDI QTAGTMTVPL CSEKTRPMSE HLKHNPPIFG
              530 540 550 560
SSGELQDNCQ QLMRNKEQEI LKGRDKEQTR DLVPPTQHYL
              570 580 590 600
KPGWIELKAP RFHQAESHLK RNEASLPSIL QYQPNLSNQM
              610 620 630 640
TSKQYTGNSN MPGGLPRQAY TQKTTQLEHK SQMYQVEMNQ
              650 660 670 680
GQSQGTVDQH LQFQKPSHQV HFSKTDHLPK AHVQSLCGTR
              690 700 710 720
FHFQQRADSQ TEKLMSPVLK QHLNQQASET EPFSNSHLLQ
              730 740 750 760
HKPHKQAAQT QPSQSSHLPQ NQQQQQKLQI KNKEEILQTF
              770 780 790 800
PHPQSNNDQQ REGSFFGQTK VEECFHGENQ YSKSSEFETH
              810 820 830 840
NVQMGLEEVQ NINRRNSPYS QTMKSSACKI QVSCSNNTHL
              850 860 870 880
VSENKEQTTH PELFAGNKTQ NLHHMQYFPN NVIPKQDLLH
              890 900 910 920
RCFQEQEQKS QQASVLQGYK NRNQDMSGQQ AAQLAQQRYL
              930 940 950 960
IHNHANVFPV PDQGGSHTQT PPQKDTQKHA ALRWHLLQKQ
              970 980 990 1000
EQQQTQQPQT ESCHSQMHRP IKVEPGCKPH ACMHTAPPEN
            1010 1020 1030 1040
KTWKKVTKQE NPPASCDNVQ QKSIIETMEQ HLKQFHAKSL
            1050 1060 1070 1080
FDHKALTLKS QKQVKVEMSG PVTVLTRQTT AAELDSHTPA
            1090 1100 1110 1120
LEQQTTSSEK TPTKRTAASV LNNFIESPSK LLDTPIKNLL
            1130 1140 1150 1160
DTPVKTQYDF PSCRCVEQII EKDEGPFYTH LGAGPNVAAI
            1170 1180 1190 1200
REIMEERFGQ KGKAIRIERV IYTGKEGKSS QGCPIAKWVV
            1210 1220 1230 1240
RRSSSEEKLL CLVRERAGHT CEAAVIVILI LVWEGIPLSL
            1250 1260 1270 1280
ADKLYSELTE TLRKYGTLTN RRCALNEERT CACQGLDPET
            1290 1300 1310 1320
CGASFSFGCS WSMYYNGCKF ARSKIPRKFK LLGDDPKEEE
            1330 1340 1350 1360
KLESHLQNLS TLMAPTYKKL APDAYNNQIE YEHRAPECRL
            1370 1380 1390 1400
GLKEGRPFSG VTACLDFCAH AHRDLHNMQN GSTLVCTLTR
            1410 1420 1430 1440
EDNREFGGKP EDEQLHVLPL YKVSDVDEFG SVEAQEEKKR
            1450 1460 1470 1480
SGAIQVLSSF RRKVRMLAEP VKTCRQRKLE AKKAAAEKLS
            1490 1500 1510 1520
SLENSSNKNE KEKSAPSRTK QTENASQAKQ LAELLRLSGP
            1530 1540 1550 1560
VMQQSQQPQP LQKQPPQPQQ QQRPQQQQPH HPQTESVNSY
            1570 1580 1590 1600
SASGSTNPYM RRPNPVSPYP NSSHTSDIYG STSPMNFYST
            1610 1620 1630 1640
SSQAAGSYLN SSNPMNPYPG LLNQNTQYPS YQCNGNLSVD
            1650 1660 1670 1680
NCSPYLGSYS PQSQPMDLYR YPSQDPLSKL SLPPIHTLYQ
            1690 1700 1710 1720
PRFGNSQSFT SKYLGYGNQN MQGDGFSSCT IRPNVHHVGK
            1730 1740 1750 1760
LPPYPTHEMD GHFMGATSRL PPNLSNPNMD YKNGEHHSPS
            1770 1780 1790 1800
HIIHNYSAAP GMFNSSLHAL HLQNKENDML SHTANGLSKM
            1810 1820 1830 1840
LPALNHDRTA CVQGGLHKLS DANGQEKQPL ALVQGVASGA
            1850 1860 1870 1880
EDNDEVWSDS EQSFLDPDIG GVAVAPTHGS ILIECAKREL
            1890 1900 1910 1920
HATTPLKNPN RNHPTRISLV FYQHKSMNEP KHGLALWEAK
            1930 1940 1950 1960
MAEKAREKEE ECEKYGPDYV PQKSHGKKVK REPAEPHETS
            1970 1980 1990 2000
EPTYLRFIKS LAERTMSVTT DSTVTTSPYA FTRVTGPYNR
  2002
YI
```

[0164] The tet2 gene is located on chromosome 4, location GRCh38.p2 (GCF_000001405.28) (NC_000004.12 (105145875 to 105279803); Gene TD 54790.

[0165] Examples of nucleic acid sequences encoding Tet2 are provided below. There are 6 identified isoforms of human Tet2 have been identified. The mRNA sequences are provided below (In embodiments, in each sequence, T may be replaced with U). In embodiments, Tet2 includes the proteins encoded by each of the sequences below:

| | NCBI | |
|---|---|---|
| | Reference | |
| NName | Sequence | Sequence |
| HHomo sapiens | NNM_001127208.2 | GGCAGTGGCAGCGGCGAGAGCTTGGGCGGCCGCCGCCGCC |
| tet | | TCCTCGCGAGCGCCGCGCGCCCGGGTCCCG |
| methylcytosine | | CTCGCATGCAAGTCACGTCCGCCCCCTCGGCGCGGCCGCCC |
| dioxygenase 2 | | CGAGACGCCGGCCCCGCTGAGTGATGAGA |
| (TET2), | | ACAGACGTCAAACTGCCTTATGAATATTGATGCGGAGGCTA |
| transcript | | GGCTGCTTTCGTAGAGAAGCAGAAGGAAG |
| variant 1, | | CAAGATGGCTGCCCTTTAGGATTTGTTAGAAAGGAGACCCG |
| mRNA | | ACTGCAACTGCTGGATTGCTGCAAGGCTG |
| [SEQ ID NO: | | AGGGACGAGAACGAGGCTGGCAAACATTCAGCAGCACACC |
| 1358] | | CTCTCAAGATTGTTTACTTGCCTTTGCTCC |
| | | TGTTGAGTTACAACGCTTGGAAGCAGGAGATGGGCTCAGCA |
| | | GCAGCCAATAGGACATGATCCAGGAAGAG |
| | | CAGTAAGGGACTGAGCTGCTGAATTCAACTAGAGGGCAGC |
| | | CTTGTGGATGGCCCCGAAGCAAGCCTGATG |
| | | GAACAGGATAGAACCAACCATGTTGAGGGCAACAGACTAA |
| | | GTCCATTCCTGATACCATCACCTCCCATTT |
| | | GCCAGACAGAACCTCTGGCTACAAAGCTCCAGAATGGAAG |
| | | CCCACTGCCTGAGAGAGCTCATCCAGAAGT |
| | | AAATGGAGACACCAAGTGGCACTCTTTCAAAAGTTATTATG |
| | | GAATACCCTGTATGAAGGGAAGCCAGAAT |
| | | AGTCGTGTGAGTCCTGACTTTACACAAGAAAGTAGAGGGTA |
| | | TTCCAAGTGTTTGCAAAATGGAGGAATAA |
| | | AACGCACAGTTAGTGAACCTTCTCTCTCTGGGCTCCTTCAGA |
| | | TCAAGAAATTGAAACAAGACCAAAAGGC |
| | | TAATGGAGAAAGACGTAACTTCGGGGTAAGCCAAGAAAGA |
| | | AATCCAGGTGAAAGCAGTCAACCAAATGTC |
| | | TCCGATTTGAGTGATAAGAAAGAATCTGTGAGTTCTGTAGC |
| | | CCAAGAAAATGCAGTTAAAGATTTCACCA |
| | | GTTTTTCAACACATAACTGCAGTGGGCCTGAAAATCCAGAG |
| | | CTTCAGATTCTGAATGAGCAGGAGGGGAA |
| | | AAGTGCTAATTACCATGACAAGAACATTGTATTACTTAAAA |
| | | ACAAGGCAGTGCTAATGCCTAATGGTGCT |
| | | ACAGTTTCTGCCTCTTCCGTGGAACACACACATGGTGAACT |
| | | CCTGGAAAAAACACTGTCTCAATATTATC |
| | | CAGATTGTGTTTCCATTGCGGTGCAGAAAACCACATCTCAC |
| | | ATAAATGCCATTAACAGTCAGGCTACTAA |
| | | TGAGTTGTCCTGTGAGATCACTCACCCATCGCATACCTCAG |
| | | GGCAGATCAATTCCGCACAGACCTCTAAC |
| | | TCTGAGCTGCCTCCAAAGCCAGCTGCAGTGGTGAGTGAGGC |
| | | CTGTGATGCTGATGATGCTGATAATGCCA |
| | | GTAAACTAGCTGCAATGCTAAATACCTGTTCCTTTCAGAAA |
| | | CCAGAACAACTACAACAACAAAAATCAGT |
| | | TTTTGAGATATGCCCATCTCCTGCAGAAAATAACATCCAGG |
| | | GAACCACAAAGCTAGCGTCTGGTGAAGAA |
| | | TTCTGTTCAGGTTCCAGCAGCAATTTGCAAGCTCCTGGTGGC |
| | | AGCTCTGAACGGTATTTAAAACAAAATG |
| | | AAATGAATGGTGCTTACTTCAAGCAAAGCTCAGTGTTCACT |
| | | AAGGATTCCTTTTCTGCCACTACCACACC |
| | | ACCACCACCATCACAATTGCTTCTTTCTCCCCCTCCTCCTCT |
| | | TCCACAGGTTCCTCAGCTTCCTTCAGAA |
| | | GGAAAAAGCACTCTGAATGGTGGAGTTTTAGAAGAACACC |
| | | ACCACTACCCCAACCAAAGTAACACAACAC |
| | | TTTTAAGGGAAGTGAAAATAGAGGGTAAACCTGAGGCACC |
| | | ACCTTCCCAGAGTCCTAATCCATCTACACA |
| | | TGTATGCAGCCCTTCTCCGATGCTTTCTGAAAGGCCTCAGA |
| | | ATAATTGTGTGAACAGGAATGACATACAG |
| | | ACTGCAGGGACAATGACTGTTCCATTGTGTTCTGAGAAAAC |
| | | AAGACCAATGTCAGAACACCTCAAGCATA |
| | | ACCCACCAATTTTTGGTAGCAGTGGAGAGCTACAGGACAAC |
| | | TGCCAGCAGTTGATGAGAAACAAAGAGCA |
| | | AGAGATTCTGAAGGGTCGAGACAAGGAGCAAACACGAGAT |
| | | CTTGTGCCCCCAACACAGCACTATCTGAAA |
| | | CCAGGATGGATTGAATTGAAGGCCCCTCGTTTTCACCAAGC |
| | | GGAATCCCATCTAAAACGTAATGAGGCAT |
| | | CACTGCCATCAATTCTTCAGTATCAACCCAATCTCTCCAATC |
| | | AAATGACCTCCAAACAATACACTGGAAA |
| | | TTCCAACATGCCTGGGGGGCTCCCAAGGCAAGCTTACACCC |
| | | AGAAAACAACACAGCTGGAGCACAAGTCA |
| | | CAAATGTACCAAGTTGAAATGAATCAAGGGCAGTCCCAAG |
| | | GTACAGTGGACCAACATCTCCAGTTCCAAA |
| | | AACCCTCACACCAGGTGCACTTCTCCAAAACAGACCATTTA |
| | | CCAAAAGCTCATGTGCAGTCACTGTGTGG |
| | | CACTAGATTTCATTTTCAACAAAGAGCAGATTCCCAAACTG |
| | | AAAAACTTATGTCCCCAGTGTTGAAACAG |
| | | CACTTGAATCAACAGGCTTCAGAGACTGAGCCATTTTCAAA |
| | | CTCACACCTTTTGCAACATAAGCCTCATA |
| | | AACAGGCAGCACAAACACAACCATCCCAGAGTTCACATCTC |
| | | CCTCAAAACCAGCAACAGCAGCAAAAATT |
| | | ACAAATAAAGAATAAAGAGGAAATACTCCAGACTTTTCCTC |
| | | ACCCCCAAAGCAACAATGATCAGCAAAGA |
| | | GAAGGATCATTCTTTGGCCAGACTAAAGTGGAAGAATGTTT |
| | | TCATGGTGAAAATCAGTATTCAAAATCAA |
| | | GCGAGTTCGAGACTCATAATGTCCAAATGGGACTGGAGGA |
| | | AGTACAGAATATAAATCGTAGAAATTCCCC |
| | | TTATAGTCAGACCATGAAATCAAGTGCATGCAAAATACAGG |
| | | TTTCTTGTTCAAACAATACACACCTAGTT |
| | | TCAGAGAATAAAGAACAGACTACACATCCTGAACTTTTTGC |
| | | AGGAAACAAGACCCAAAACTTGCATCACA |
| | | TGCAATATTTTCCAAATAATGTGATCCCAAAGCAAGATCTT |
| | | CTTCACAGGTGCTTTCAAGAACAGGAGCA |
| | | GAAGTCACAACAAGCTTCAGTTCTACAGGGATATAAAAATA |
| | | GAAACCAAGATATGTCTGGTCAACAAGCT |
| | | GCGCAACTTGCTCAGCAAAGGTACTTGATACATAACCATGC |
| | | AAATGTTTTTCCTGTGCCTGACCAGGGAG |
| | | GAAGTCACACTCAGACCCCTCCCCAGAAGGACACTCAAAA |
| | | GCATGCTGCTCTAAGGTGGCATCTCTTACA |
| | | GAAGCAAGAACAGCAGCAAACACAGCAACCCCAAACTGAG |
| | | TCTTGCCATAGTCAGATGCACAGGCCAATT |
| | | AAGGTGGAACCTGGATGCAAGCCACATGCCTGTATGCACAC |
| | | AGCACCACCAGAAAACAAAACATGGAAAA |
| | | AGGTAACTAAGCAAGAGAATCCACCTGCAAGCTGTGATAAT |
| | | GTGCAGCAAAAGAGCATCATTGAGACCAT |
| | | GGAGCAGCATCTGAAGCAGTTTCACGCCAAGTCGTTATTTG |
| | | ACCATAAGGCTCTTACTCTCAAATCACAG |
| | | AAGCAAGTAAAAGTTGAAATGTCAGGGCCAGTCACAGTTTT |
| | | GACTAGACAAACCACTGCTGCAGAACTTG |
| | | ATAGCCACACCCCAGCTTTAGAGCAGCAAACAACTTCTTCA |
| | | GAAAAGACACCAACCAAAAGAACAGCTGC |
| | | TTCTGTTCTCAATAATTTTATAGAGTCACCTTCCAAATTACT |
| | | AGATACTCCTATAAAAAATTTATTGGAT |
| | | ACACCTGTCAAGACTCAATATGATTTCCCATCTTGCAGATGT |
| | | GTAGAGCAAATTATTGAAAAAGATGAAG |
| | | GTCCTTTTTATACCCATCTAGGAGCAGGTCCTAATGTGGCA |
| | | GCTATTAGAGAAATCATGGAAGAAAGGTT |
| | | TGGACAGAAGGGTAAAGCTATTAGGATTGAAAGAGTCATCT |
| | | ATACTGGTAAAGAAGGCAAAAGTTCTCAG |
| | | GGATGTCCTATTGCTAAGTGGGTGGTTCGCAGAAGCAGCAG |
| | | TGAAGAGAAGCTACTGTGTTTGGTGCGGG |
| | | AGCGAGCTGGCCACACCTGTGAGGCTGCAGTGATTGTGATT |
| | | CTCATCCTGGTGTGGGAAGGAATCCCGCT |
| | | GTCTCTGGCTGACAAACTCTACTCGGAGCTTACCGAGACGC |
| | | TGAGGAAATACGGCACGCTCACCAATCGC |
| | | CGGTGTGCCTTGAATGAAGAGAGAACTTGCGCCTGTCAGGG |
| | | GCTGGATCCAGAAACCTGTGGTGCCTCCT |
| | | TCTCTTTTGGTTGTTCATGGAGCATGTACTACAATGGATGTA |
| | | AGTTTGCCAGAAGCAAGATCCCAAGGAA |
| | | GTTTAAGCTGCTTGGGGATGACCCAAAAGAGGAAGAGAAA |
| | | CTGGAGTCTCATTTGCAAAACCTGTCCACT |
| | | CTTATGGCACCAACATATAAGAAACTTGCACCTGATGCATA |
| | | TAATAATCAGATTGAATATGAACACAGAG |
| | | CACCAGAGTGCCGTCTGGGTCTGAAGGAAGGCCGTCCATTC |
| | | TCAGGGGTCACTGCATGTTTGGACTTCTG |
| | | TGCTCATGCCCACAGAGACTTGCACAACATGCAGAATGGCA |
| | | GCACATTGGTATGCACTCTCACTAGAGAA |
| | | GACAATCGAGAATTTGGAGGAAAACCTGAGGATGAGCAGC |
| | | TTCACGTTCTGCCTTTATACAAAGTCTCTG |
| | | ACGTGGATGAGTTTGGGAGTGTGGAAGCTCAGGAGGAGAA |
| | | AAAACGGAGTGGTGCCATTCAGGTACTGAG |
| | | TTCTTTTCGGCGAAAAGTCAGGATGTTAGCAGAGCCAGTCA |
| | | AGACTTGCCGACAAAGGAAACTAGAAGCC |
| | | AAGAAAGCTGCAGCTGAAAAGCTTTCCTCCCTGGAGAACAG |
| | | CTCAAATAAAAATGAAAAGGAAAAGTCAG |
| | | CCCCATCACGTACAAAACAAACTGAAAACGCAAGCCAGGC |
| | | TAAACAGTTGGCAGAACTTTTGCGACTTTC |
| | | AGGACCAGTCATGCAGCAGTCCCAGCAGCCCCAGCCTCTAC |
| | | AGAAGCAGCCACCACAGCCCCAGCAGCAG |
| | | CAGAGACCCCAGCAGCAGCAGCCACATCACCCTCAGACAG |
| | | AGTCTGTCAACTCTTATTCTGCTTCTGGAT |
| | | CCACCAATCCATACATGAGACGGCCCAATCCAGTTAGTCCT |
| | | TATCCAAACTCTTCACACACTTCAGATAT |
| | | CTATGGAAGCACCAGCCCTATGAACTTCTATTCCACCTCATC |
| | | TCAAGCTGCAGGTTCATATTTGAATTCT |
| | | TCTAATCCCATGAACCCTTACCCTGGGCTTTTGAATCAGAAT |
| | | ACCCAATATCCATCATATCAATGCAATG |
| | | GAAACCTATCAGTGGACAACTGCTCCCCATATCTGGGTTCC |
| | | TATTCTCCCCAGTCTCAGCCGATGGATCT |
| | | GTATAGGTATCCAAGCCAAGACCCTCTGTCTAAGCTCAGTC |
| | | TACCACCCATCCATACACTTTACCAGCCA |
| | | AGGTTTGGAAATAGCCAGAGTTTTACATCTAAATACTTAGG |
| | | TTATGGAAACCAAAATATGCAGGGAGATG |
| | | GTTTCAGCAGTTGTACCATTAGACCAAATGTACATCATGTA |
| | | GGGAAATTGCCTCCTTATCCCACTCATGA |
| | | GATGGATGGCCACTTCATGGGAGCCACCTCTAGATTACCAC |
| | | CCAATCTGAGCAATCCAAACATGGACTAT |
| | | AAAAATGGTGAACATCATTCACCTTCTCACATAATCCATAA |
| | | CTACAGTGCAGCTCCGGGCATGTTCAACA |
| | | GCTCTCTTCATGCCCTGCATCTCCAAAACAAGGAGAATGAC |
| | | ATGCTTTCCCACACAGCTAATGGGTTATC |
| | | AAAGATGCTTCCAGCTCTTAACCATGATAGAACTGCTTGTG |
| | | TCCAAGGAGGCTTACACAAATTAAGTGAT |
| | | GCTAATGGTCAGGAAAAGCAGCCATTGGCACTAGTCCAGG |
| | | GTGTGGCTTCTGGTGCAGAGGACAACGATG |
| | | AGGTCTGGTCAGACAGCGAGCAGAGCTTTCTGGATCCTGAC |
| | | ATTGGGGGAGTGGCCGTGGCTCCAACTCA |
| | | TGGGTCAATTCTCATTGAGTGTGCAAAGCGTGAGCTGCATG |
| | | CCACAACCCCTTTAAAGAATCCCAATAGG |
| | | AATCACCCCACCAGGATCTCCCTCGTCTTTTACCAGCATAA |
| | | GAGCATGAATGAGCCAAAACATGGCTTGG |
| | | CTCTTTGGGAAGCCAAAATGGCTGAAAAAGCCCGTGAGAA |
| | | AGAGGAAGAGTGTGAAAAGTATGGCCCAGA |
| | | CTATGTGCCTCAGAAATCCCATGGCAAAAAAGTGAAACGG |
| | | GAGCCTGCTGAGCCACATGAAACTTCAGAG |
| | | CCCACTTACCTGCGTTTCATCAAGTCTCTTGCCGAAAGGACC |
| | | ATGTCCGTGACCACAGACTCCACAGTAA |
| | | CTACATCTCCATATGCCTTCACTCGGGTCACAGGGCCTTACA |
| | | ACAGATATATATGATATCACCCCCTTTT |
| | | GTTGGTTACCTCACTTGAAAAGACCACAACCAACCTGTCAG |
| | | TAGTATAGTTCTCATGACGTGGGCAGTGG |
| | | GGAAAGGTCACAGTATTCATGACAAATGTGGTGGGAAAAA |
| | | CCTCAGCTCACCAGCAACAAAAGAGGTTAT |
| | | CTTACCATAGCACTTAATTTTCACTGGCTCCCAAGTGGTCAC |
| | | AGATGGCATCTAGGAAAAGACCAAAGCA |
| | | TTCTATGCAAAAAGAAGGTGGGGAAGAAAGTGTTCCGCAA |
| | | TTTACATTTTTAAACACTGGTTCTATTATT |
| | | GGACGAGATGATATGTAAATGTGATCCCCCCCCCCCGCTTA |
| | | CAACTCTACACATCTGTGACCACTTTTAA |
| | | TAATATCAAGTTTGCATAGTCATGGAACACAAATCAAACAA |
| | | GTACTGTAGTATTACAGTGACAGGAATCT |
| | | TAAAATACCATCTGGTGCTGAATATATGATGTACTGAAATA |
| | | CTGGAATTATGGCTTTTTGAAATGCAGTT |
| | | TTTACTGTAATCTTAACTTTTATTTATCAAAATAGCTACAGG |
| | | AAACATGAATAGCAGGAAAACACTGAAT |
| | | TTGTTTGGATGTTCTAAGAAATGGTGCTAAGAAAATGGTGT |
| | | CTTTAATAGCTAAAAATTTAATGCCTTTA |
| | | TATCATCAAGATGCTATCAGTGTACTCCAGTGCCCTTGAAT |
| | | AATAGGGGTACCTTTTCATTCAAGTTTTT |
| | | ATCATAATTACCTATTCTTACACAAGCTTAGTTTTTAAAATG |
| | | TGGACATTTTAAAGGCCTCTGGATTTTG |
| | | CTCATCCAGTGAAGTCCTTGTAGGACAATAAACGTATATAT |
| | | GTACATATATACACAAACATGTATATGTG |
| | | CACACACATGTATATGTATAAATATTTTAAATGGTGTTTTAG |
| | | AAGCACTTTGTCTACCTAAGCTTTGACA |
| | | ACTTGAACAATGCTAAGGTACTGAGATGTTTAAAAAACAAG |
| | | TTTACTTTCATTTTAGAATGCAAAGTTGA |
| | | TTTTTTTAAGGAAACAAAGAAAGCTTTTAAAATATTTTTGCT |
| | | TTTAGCCATGCATCTGCTGATGAGCAAT |
| | | TGTGTCCATTTTTAACACAGCCAGTTAAATCCACCATGGGG |
| | | CTTACTGGATTCAAGGGAATACGTTAGTC |
| | | CACAAAACATGTTTTCTGGTGCTCATCTCACATGCTATACTG |
| | | TAAAACAGTTTTATACAAAATTGTATGA |
| | | CAAGTTCATTGCTCAAAAATGTACAGTTTTAAGAATTTTCTA |
| | | TTAACTGCAGGTAATAATTAGCTGCATG |
| | | CTGCAGACTCAACAAAGCTAGTTCACTGAAGCCTATGCTAT |
| | | TTTATGGATCATAGGCTCTTCAGAGAACT |
| | | GAATGGCAGTCTGCCTTTGTGTTGATAATTATGTACATTGTG |
| | | ACGTTGTCATTTCTTAGCTTAAGTGTCC |
| | | TCTTTAACAAGAGGATTGAGCAGACTGATGCCTGCATAAGA |
| | | TGAATAAACAGGGTTAGTTCCATGTGAAT |
| | | CTGTCAGTTAAAAAGAAACAAAAACAGGCAGCTGGTTTGCT |
| | | GTGGTGGTTTTAAATCATTAATTTGTATA |
| | | AAGAAGTGAAAGAGTTGTATAGTAAATTAAATTGTAAACA |
| | | AAACTTTTTTAATGCAATGCTTTAGTATTT |
| | | TAGTACTGTAAAAAAATTAAATATATACATATATATATATA |
| | | TATATATATATATATATATGAGTTTGAAG |
| | | CAGAATTCACATCATGATGGTGCTACTCAGCCTGCTACAAA |
| | | TATATCATAATGTGAGCTAAGAATTCATT |
| | | AAATGTTTGAGTGATGTTCCTACTTGTCATATACCTCAACAC |
| | | TAGTTTGGCAATAGGATATTGAACTGAG |
| | | AGTGAAAGCATTGTGTACCATCATTTTTTTCCAAGTCCTTTT |
| | | TTTTATTGTTAAAAAAAAAAGCATACCT |
| | | TTTTTCAATACTTGATTTCTTAGCAAGTATAACTTGAACTTC |
| | | AACCTTTTTGTTCTAAAAATTCAGGGAT |
| | | ATTTCAGCTCATGCTCTCCCTATGCCAACATGTCACCTGTGT |
| | | TTATGTAAAATTGTTGTAGGTTAATAAA |
| | | TATATTCTTTGTCAGGGATTTAACCCTTTTATTTTGAATCCCT |
| | | TCTATTTTACTTGTACATGTGCTGATG |
| | | TAACTAAAACTAATTTTGTAAATCTGTTGGCTCTTTTTATTG |
| | | TAAAGAAAAGCATTTTAAAAGTTTGAGG |
| | | AATCTTTTGACTGTTTCAAGCAGGAAAAAAAAATTACATGA |
| | | AAATAGAATGCACTGAGTTGATAAAGGGA |
| | | AAAATTGTAAGGCAGGAGTTTGGCAAGTGGCTGTTGGCCAG |
| | | AGACTTACTTGTAACTCTCTAAATGAAGT |
| | | TTTTTTGATCCTGTAATCACTGAAGGTACATACTCCATGTGG |
| | | ACTTCCCTTAAACAGGCAAACACCTACA |
| | | GGTATGGTGTGCAACAGATTGTACAATTACATTTTGGCCTA |
| | | AATACATTTTTGCTTACTAGTATTTAAAA |
| | | TAAATTCTTAATCAGAGGAGGCCTTTGGGTTTTATTGGTCAA |
| | | ATCTTTGTAAGCTGGCTTTTGTCTTTTT |
| | | AAAAAATTTCTTGAATTTGTGGTTGTGTCCAATTTGCAAACA |
| | | TTTCCAAAAATGTTTGCTTTGCTTACAA |
| | | ACCACATGATTTTAATGTTTTTTGTATACCATAATATCTAGC |
| | | CCCAAACATTTGATTACTACATGTGCAT |
| | | TGGTGATTTTGATCATCCATTCTTAATATTTGATTTCTGTGTC |
| | | ACCTACTGTCATTTGTTAAACTGCTGG |
| | | CCAACAAGAACAGGAAGTATAGTTTGGGGGGTTGGGGAGA |
| | | GTTTACATAAGGAAGAGAAGAAATTGAGTG |
| | | GCATATTGTAAATATCAGATCTATAATTGTAAATATAAAAC |
| | | CTGCCTCAGTTAGAATGAATGGAAAGCAG |
| | | ATCTACAATTTGCTAATATAGGAATATCAGGTTGACTATAT |
| | | AGCCATACTTGAAAATGCTTCTGAGTGGT |
| | | GTCAACTTTACTTGAATGAATTTTTCATCTTGATTGACGCAC |
| | | AGTGATGTACAGTTCACTTCTGAAGCTA |
| | | GTGGTTAACTTGTGTAGGAAACTTTTGCAGTTTGACACTAA |
| | | GATAACTTCTGTGTGCATTTTTCTATGCT |
| | | TTTTTAAAAACTAGTTTCATTTCATTTTCATGAGATGTTTGG |
| | | TTTATAAGATCTGAGGATGGTTATAAAT |
| | | ACTGTAAGTATTGTAATGTTATGAATGCAGGTTATTTGAAA |
| | | GCTGTTTATTATTATATCATTCCTGATAA |
| | | TGCTATGTGAGTGTTTTTAATAAAATTTATATTTATTTAATG |
| | | CACTCTAAAAAAAAAAAAAAAAAA |
| PPREDICTED: | XXM_005263082.1 | AAGCAGAAGGAAGCAAGATGGCTGCCCTTTAGGATTTGTTA |
| Homo sapiens | | GAAAGGAGACCCGACTGCAACTGCTGGAT |
| tet | | TGCTGCAAGGCTGAGGGACGAGAACGAGAATTCAACTAGA |
| methylcytosine | | GGGCAGCCTTGTGGATGGCCCCGAAGCAAG |
| dioxygenase 2 | | CCTGATGGAACAGGATAGAACCAACCATGTTGAGGGCAAC |
| (TET2), | | AGACTAAGTCCATTCCTGATACCATCACCT |
| transcript | | CCCATTTGCCAGACAGAACCTCTGGCTACAAAGCTCCAGAA |
| variant X1, | | TGGAAGCCCACTGCCTGAGAGAGCTCATC |
| mRNA | | CAGAAGTAAATGGAGACACCAAGTGGCACTCTTTCAAAAGT |
| [SEQ ID NO: | | TATTATGGAATACCCTGTATGAAGGGAAG |
| 1359] | | CCAGAATAGTCGTGTGAGTCCTGACTTTACACAAGAAAGTA |
| | | GAGGGTATTCCAAGTGTTTGCAAAATGGA |
| | | GGAATAAAACGCACAGTTAGTGAACCTTCTCTCTCTGGGCT |
| | | CCTTCAGATCAAGAAATTGAAACAAGACC |
| | | AAAAGGCTAATGGAGAAAGACGTAACTTCGGGGTAAGCCA |
| | | AGAAAGAAATCCAGGTGAAAGCAGTCAACC |
| | | AAATGTCTCCGATTTGAGTGATAAGAAAGAATCTGTGAGTT |
| | | CTGTAGCCCAAGAAAATGCAGTTAAAGAT |
| | | TTCACCAGTTTTTCAACACATAACTGCAGTGGGCCTGAAAA |
| | | TCCAGAGCTTCAGATTCTGAATGAGCAGG |
| | | AGGGGAAAAGTGCTAATTACCATGACAAGAACATTGTATTA |
| | | CTTAAAAACAAGGCAGTGCTAATGCCTAA |
| | | TGGTGCTACAGTTTCTGCCTCTTCCGTGGAACACACACATG |
| | | GTGAACTCCTGGAAAAAACACTGTCTCAA |
| | | TATTATCCAGATTGTGTTTCCATTGCGGTGCAGAAAACCAC |
| | | ATCTCACATAAATGCCATTAACAGTCAGG |
| | | CTACTAATGAGTTGTCCTGTGAGATCACTCACCCATCGCAT |
| | | ACCTCAGGGCAGATCAATTCCGCACAGAC |
| | | CTCTAACTCTGAGCTGCCTCCAAAGCCAGCTGCAGTGGTGA |
| | | GTGAGGCCTGTGATGCTGATGATGCTGAT |
| | | AATGCCAGTAAACTAGCTGCAATGCTAAATACCTGTTCCTT |
| | | TCAGAAACCAGAACAACTACAACAACAAA |
| | | AATCAGTTTTTGAGATATGCCCATCTCCTGCAGAAAATAAC |
| | | ATCCAGGGAACCACAAAGCTAGCGTCTGG |
| | | TGAAGAATTCTGTTCAGGTTCCAGCAGCAATTTGCAAGCTC |
| | | CTGGTGGCAGCTCTGAACGGTATTTAAAA |
| | | CAAAATGAAATGAATGGTGCTTACTTCAAGCAAAGCTCAGT |
| | | GTTCACTAAGGATTCCTTTTCTGCCACTA |
| | | CCACACCACCACCACCATCACAATTGCTTCTTTCTCCCCCTC |
| | | CTCCTCTTCCACAGGTTCCTCAGCTTCC |
| | | TTCAGAAGGAAAAAGCACTCTGAATGGTGGAGTTTTAGAAG |
| | | AACACCACCACTACCCCAACCAAAGTAAC |
| | | ACAACACTTTTAAGGGAAGTGAAAATAGAGGGTAAACCTG |
| | | AGGCACCACCTTCCCAGAGTCCTAATCCAT |
| | | CTACACATGTATGCAGCCCTTCTCCGATGCTTTCTGAAAGGC |
| | | CTCAGAATAATTGTGTGAACAGGAATGA |
| | | CATACAGACTGCAGGGACAATGACTGTTCCATTGTGTTCTG |
| | | AGAAAACAAGACCAATGTCAGAACACCTC |
| | | AAGCATAACCCACCAATTTTTGGTAGCAGTGGAGAGCTACA |
| | | GGACAACTGCCAGCAGTTGATGAGAAACA |
| | | AAGAGCAAGAGATTCTGAAGGGTCGAGACAAGGAGCAAAC |
| | | ACGAGATCTTGTGCCCCCAACACAGCACTA |
| | | TCTGAAACCAGGATGGATTGAATTGAAGGCCCCTCGTTTTC |
| | | ACCAAGCGGAATCCCATCTAAAACGTAAT |
| | | GAGGCATCACTGCCATCAATTCTTCAGTATCAACCCAATCT |
| | | CTCCAATCAAATGACCTCCAAACAATACA |
| | | CTGGAAATTCCAACATGCCTGGGGGGCTCCCAAGGCAAGCT |
| | | TACACCCAGAAAACAACACAGCTGGAGCA |
| | | CAAGTCACAAATGTACCAAGTTGAAATGAATCAAGGGCAG |
| | | TCCCAAGGTACAGTGGACCAACATCTCCAG |
| | | TTCCAAAAACCCTCACACCAGGTGCACTTCTCCAAAACAGA |
| | | CCATTTACCAAAAGCTCATGTGCAGTCAC |
| | | TGTGTGGCACTAGATTTCATTTTCAACAAAGAGCAGATTCC |
| | | CAAACTGAAAAACTTATGTCCCCAGTGTT |
| | | GAAACAGCACTTGAATCAACAGGCTTCAGAGACTGAGCCAT |
| | | TTTCAAACTCACACCTTTTGCAACATAAG |
| | | CCTCATAAACAGGCAGCACAAACACAACCATCCCAGAGTTC |
| | | ACATCTCCCTCAAAACCAGCAACAGCAGC |
| | | AAAAATTACAAATAAAGAATAAAGAGGAAATACTCCAGAC |
| | | TTTTCCTCACCCCCAAAGCAACAATGATCA |
| | | GCAAAGAGAAGGATCATTCTTTGGCCAGACTAAAGTGGAA |
| | | GAATGTTTTCATGGTGAAAATCAGTATTCA |
| | | AAATCAAGCGAGTTCGAGACTCATAATGTCCAAATGGGACT |
| | | GGAGGAAGTACAGAATATAAATCGTAGAA |
| | | ATTCCCCTTATAGTCAGACCATGAAATCAAGTGCATGCAAA |
| | | ATACAGGTTTCTTGTTCAAACAATACACA |
| | | CCTAGTTTCAGAGAATAAAGAACAGACTACACATCCTGAAC |
| | | TTTTTGCAGGAAACAAGACCCAAAACTTG |
| | | CATCACATGCAATATTTTCCAAATAATGTGATCCCAAAGCA |
| | | AGATCTTCTTCACAGGTGCTTTCAAGAAC |
| | | AGGAGCAGAAGTCACAACAAGCTTCAGTTCTACAGGGATAT |
| | | AAAAATAGAAACCAAGATATGTCTGGTCA |
| | | ACAAGCTGCGCAACTTGCTCAGCAAAGGTACTTGATACATA |
| | | ACCATGCAAATGTTTTTCCTGTGCCTGAC |
| | | CAGGGAGGAAGTCACACTCAGACCCCTCCCCAGAAGGACA |
| | | CTCAAAAGCATGCTGCTCTAAGGTGGCATC |
| | | TCTTACAGAAGCAAGAACAGCAGCAAACACAGCAACCCCA |
| | | AACTGAGTCTTGCCATAGTCAGATGCACAG |
| | | GCCAATTAAGGTGGAACCTGGATGCAAGCCACATGCCTGTA |
| | | TGCACACAGCACCACCAGAAAACAAAACA |
| | | TGGAAAAAGGTAACTAAGCAAGAGAATCCACCTGCAAGCT |
| | | GTGATAATGTGCAGCAAAAGAGCATCATTG |
| | | AGACCATGGAGCAGCATCTGAAGCAGTTTCACGCCAAGTCG |
| | | TTATTTGACCATAAGGCTCTTACTCTCAA |
| | | ATCACAGAAGCAAGTAAAAGTTGAAATGTCAGGGCCAGTC |
| | | ACAGTTTTGACTAGACAAACCACTGCTGCA |
| | | GAACTTGATAGCCACACCCCAGCTTTAGAGCAGCAAACAAC |
| | | TTCTTCAGAAAAGACACCAACCAAAAGAA |
| | | CAGCTGCTTCTGTTCTCAATAATTTTATAGAGTCACCTTCCA |
| | | AATTACTAGATACTCCTATAAAAAATTT |
| | | ATTGGATACACCTGTCAAGACTCAATATGATTTCCCATCTTG |
| | | CAGATGTGTAGAGCAAATTATTGAAAAA |
| | | GATGAAGGTCCTTTTTATACCCATCTAGGAGCAGGTCCTAA |
| | | TGTGGCAGCTATTAGAGAAATCATGGAAG |
| | | AAAGGTTTGGACAGAAGGGTAAAGCTATTAGGATTGAAAG |
| | | AGTCATCTATACTGGTAAAGAAGGCAAAAG |
| | | TTCTCAGGGATGTCCTATTGCTAAGTGGGTGGTTCGCAGAA |
| | | GCAGCAGTGAAGAGAAGCTACTGTGTTTG |
| | | GTGCGGGAGCGAGCTGGCCACACCTGTGAGGCTGCAGTGAT |
| | | TGTGATTCTCATCCTGGTGTGGGAAGGAA |
| | | TCCCGCTGTCTCTGGCTGACAAACTCTACTCGGAGCTTACCG |
| | | AGACGCTGAGGAAATACGGCACGCTCAC |
| | | CAATCGCCGGTGTGCCTTGAATGAAGAGAGAACTTGCGCCT |
| | | GTCAGGGGCTGGATCCAGAAACCTGTGGT |
| | | GCCTCCTTCTCTTTTGGTTGTTCATGGAGCATGTACTACAAT |
| | | GGATGTAAGTTTGCCAGAAGCAAGATCC |
| | | CAAGGAAGTTTAAGCTGCTTGGGGATGACCCAAAAGAGGA |
| | | AGAGAAACTGGAGTCTCATTTGCAAAACCT |
| | | GTCCACTCTTATGGCACCAACATATAAGAAACTTGCACCTG |
| | | ATGCATATAATAATCAGATTGAATATGAA |
| | | CACAGAGCACCAGAGTGCCGTCTGGGTCTGAAGGAAGGCC |
| | | GTCCATTCTCAGGGGTCACTGCATGTTTGG |
| | | ACTTCTGTGCTCATGCCCACAGAGACTTGCACAACATGCAG |
| | | AATGGCAGCACATTGGTATGCACTCTCAC |
| | | TAGAGAAGACAATCGAGAATTTGGAGGAAAACCTGAGGAT |
| | | GAGCAGCTTCACGTTCTGCCTTTATACAAA |
| | | GTCTCTGACGTGGATGAGTTTGGGAGTGTGGAAGCTCAGGA |
| | | GGAGAAAAAACGGAGTGGTGCCATTCAGG |
| | | TACTGAGTTCTTTTCGGCGAAAAGTCAGGATGTTAGCAGAG |
| | | CCAGTCAAGACTTGCCGACAAAGGAAACT |
| | | AGAAGCCAAGAAAGCTGCAGCTGAAAAGCTTTCCTCCCTGG |
| | | AGAACAGCTCAAATAAAAATGAAAAGGAA |
| | | AAGTCAGCCCCATCACGTACAAAACAAACTGAAAACGCAA |
| | | GCCAGGCTAAACAGTTGGCAGAACTTTTGC |
| | | GACTTTCAGGACCAGTCATGCAGCAGTCCCAGCAGCCCCAG |
| | | CCTCTACAGAAGCAGCCACCACAGCCCCA |
| | | GCAGCAGCAGAGACCCCAGCAGCAGCAGCCACATCACCCT |
| | | CAGACAGAGTCTGTCAACTCTTATTCTGCT |
| | | TCTGGATCCACCAATCCATACATGAGACGGCCCAATCCAGT |
| | | TAGTCCTTATCCAAACTCTTCACACACTT |
| | | CAGATATCTATGGAAGCACCAGCCCTATGAACTTCTATTCC |
| | | ACCTCATCTCAAGCTGCAGGTTCATATTT |
| | | GAATTCTTCTAATCCCATGAACCCTTACCCTGGGCTTTTGAA |
| | | TCAGAATACCCAATATCCATCATATCAA |
| | | TGCAATGGAAACCTATCAGTGGACAACTGCTCCCCATATCT |
| | | GGGTTCCTATTCTCCCCAGTCTCAGCCGA |
| | | TGGATCTGTATAGGTATCCAAGCCAAGACCCTCTGTCTAAG |
| | | CTCAGTCTACCACCCATCCATACACTTTA |
| | | CCAGCCAAGGTTTGGAAATAGCCAGAGTTTTACATCTAAAT |
| | | ACTTAGGTTATGGAAACCAAAATATGCAG |
| | | GGAGATGGTTTCAGCAGTTGTACCATTAGACCAAATGTACA |
| | | TCATGTAGGGAAATTGCCTCCTTATCCCA |
| | | CTCATGAGATGGATGGCCACTTCATGGGAGCCACCTCTAGA |
| | | TTACCACCCAATCTGAGCAATCCAAACAT |
| | | GGACTATAAAAATGGTGAACATCATTCACCTTCTCACATAA |
| | | TCCATAACTACAGTGCAGCTCCGGGCATG |
| | | TTCAACAGCTCTCTTCATGCCCTGCATCTCCAAAACAAGGA |
| | | GAATGACATGCTTTCCCACACAGCTAATG |
| | | GGTTATCAAAGATGCTTCCAGCTCTTAACCATGATAGAACT |
| | | GCTTGTGTCCAAGGAGGCTTACACAAATT |
| | | AAGTGATGCTAATGGTCAGGAAAAGCAGCCATTGGCACTA |
| | | GTCCAGGGTGTGGCTTCTGGTGCAGAGGAC |
| | | AACGATGAGGTCTGGTCAGACAGCGAGCAGAGCTTTCTGGA |
| | | TCCTGACATTGGGGGAGTGGCCGTGGCTC |
| | | CAACTCATGGGTCAATTCTCATTGAGTGTGCAAAGCGTGAG |
| | | CTGCATGCCACAACCCCTTTAAAGAATCC |
| | | CAATAGGAATCACCCCACCAGGATCTCCCTCGTCTTTTACC |
| | | AGCATAAGAGCATGAATGAGCCAAAACAT |
| | | GGCTTGGCTCTTTGGGAAGCCAAAATGGCTGAAAAAGCCCG |
| | | TGAGAAAGAGGAAGAGTGTGAAAAGTATG |
| | | GCCCAGACTATGTGCCTCAGAAATCCCATGGCAAAAAAGTG |
| | | AAACGGGAGCCTGCTGAGCCACATGAAAC |
| | | TTCAGAGCCCACTTACCTGCGTTTCATCAAGTCTCTTGCCGA |
| | | AAGGACCATGTCCGTGACCACAGACTCC |
| | | ACAGTAACTACATCTCCATATGCCTTCACTCGGGTCACAGG |
| | | GCCTTACAACAGATATATATGATATCACC |
| | | CCCTTTTGTTGGTTACCTCACTTGAAAAGACCACAACCAAC |
| | | CTGTCAGTAGTATAGTTCTCATGACGTGG |
| | | GCAGTGGGGAAAGGTCACAGTATTCATGACAAATGTGGTG |
| | | GGAAAAACCTCAGCTCACCAGCAACAAAAG |
| | | AGGTTATCTTACCATAGCACTTAATTTTCACTGGCTCCCAAG |
| | | TGGTCACAGATGGCATCTAGGAAAAGAC |
| | | CAAAGCATTCTATGCAAAAAGAAGGTGGGGAAGAAAGTGT |
| | | TCCGCAATTTACATTTTTAAACACTGGTTC |
| | | TATTATTGGACGAGATGATATGTAAATGTGATCCCCCCCCC |
| | | CCGCTTACAACTCTACACATCTGTGACCA |
| | | CTTTTAATAATATCAAGTTTGCATAGTCATGGAACACAAAT |
| | | CAAACAAGTACTGTAGTATTACAGTGACA |
| | | GGAATCTTAAAATACCATCTGGTGCTGAATATATGATGTAC |
| | | TGAAATACTGGAATTATGGCTTTTTGAAA |
| | | TGCAGTTTTTACTGTAATCTTAACTTTTATTTATCAAAATAG |
| | | CTACAGGAAACATGAATAGCAGGAAAAC |
| | | ACTGAATTTGTTTGGATGTTCTAAGAAATGGTGCTAAGAAA |
| | | ATGGTGTCTTTAATAGCTAAAAATTTAAT |
| | | GCCTTTATATCATCAAGATGCTATCAGTGTACTCCAGTGCCC |
| | | TTGAATAATAGGGGTACCTTTTCATTCA |
| | | AGTTTTTATCATAATTACCTATTCTTACACAAGCTTAGTTTT |
| | | TAAAATGTGGACATTTTAAAGGCCTCTG |
| | | GATTTTGCTCATCCAGTGAAGTCCTTGTAGGACAATAAACG |
| | | TATATATGTACATATATACACAAACATGT |
| | | ATATGTGCACACACATGTATATGTATAAATATTTTAAATGG |
| | | TGTTTTAGAAGCACTTTGTCTACCTAAGC |
| | | TTTGACAACTTGAACAATGCTAAGGTACTGAGATGTTTAAA |
| | | AAACAAGTTTACTTTCATTTTAGAATGCA |
| | | AAGTTGATTTTTTTAAGGAAACAAAGAAAGCTTTTAAAATA |
| | | TTTTTGCTTTTAGCCATGCATCTGCTGAT |
| | | GAGCAATTGTGTCCATTTTTAACACAGCCAGTTAAATCCAC |
| | | CATGGGGCTTACTGGATTCAAGGGAATAC |
| | | GTTAGTCCACAAAACATGTTTTCTGGTGCTCATCTCACATGC |
| | | TATACTGTAAAACAGTTTTATACAAAAT |
| | | TGTATGACAAGTTCATTGCTCAAAAATGTACAGTTTTAAGA |
| | | ATTTTCTATTAACTGCAGGTAATAATTAG |
| | | CTGCATGCTGCAGACTCAACAAAGCTAGTTCACTGAAGCCT |
| | | ATGCTATTTTATGGATCATAGGCTCTTCA |
| | | GAGAACTGAATGGCAGTCTGCCTTTGTGTTGATAATTATGT |
| | | ACATTGTGACGTTGTCATTTCTTAGCTTA |
| | | AGTGTCCTCTTTAACAAGAGGATTGAGCAGACTGATGCCTG |
| | | CATAAGATGAATAAACAGGGTTAGTTCCA |
| | | TGTGAATCTGTCAGTTAAAAAGAAACAAAAACAGGCAGCT |
| | | GGTTTGCTGTGGTGGTTTTAAATCATTAAT |
| | | TTGTATAAAGAAGTGAAAGAGTTGTATAGTAAATTAAATTG |
| | | TAAACAAAACTTTTTTAATGCAATGCTTT |
| | | AGTATTTTAGTACTGTAAAAAAATTAAATATATACATATAT |
| | | ATATATATATATATATATATATATATGAG |
| | | TTTGAAGCAGAATTCACATCATGATGGTGCTACTCAGCCTG |
| | | CTACAAATATATCATAATGTGAGCTAAGA |
| | | ATTCATTAAATGTTTGAGTGATGTTCCTACTTGTCATATACC |
| | | TCAACACTAGTTTGGCAATAGGATATTG |
| | | AACTGAGAGTGAAAGCATTGTGTACCATCATTTTTTTCCAA |
| | | GTCCTTTTTTTTATTGTTAAAAAAAAAAG |
| | | CATACCTTTTTTCAATACTTGATTTCTTAGCAAGTATAACTT |
| | | GAACTTCAACCTTTTTGTTCTAAAAATT |
| | | CAGGGATATTTCAGCTCATGCTCTCCCTATGCCAACATGTCA |
| | | CCTGTGTTTATGTAAAATTGTTGTAGGT |
| | | TAATAAATATATTCTTTGTCAGGGATTTAACCCTTTTATTTT |
| | | GAATCCCTTCTATTTTACTTGTACATGT |
| | | GCTGATGTAACTAAAACTAATTTTGTAAATCTGTTGGCTCTT |
| | | TTTATTGTAAAGAAAAGCATTTTAAAAG |
| | | TTTGAGGAATCTTTTGACTGTTTCAAGCAGGAAAAAAAAAT |
| | | TACATGAAAATAGAATGCACTGAGTTGAT |
| | | AAAGGGAAAAATTGTAAGGCAGGAGTTTGGCAAGTGGCTG |
| | | TTGGCCAGAGACTTACTTGTAACTCTCTAA |
| | | ATGAAGTTTTTTTGATCCTGTAATCACTGAAGGTACATACTC |
| | | CATGTGGACTTCCCTTAAACAGGCAAAC |
| | | ACCTACAGGTATGGTGTGCAACAGATTGTACAATTACATTT |
| | | TGGCCTAAATACATTTTTGCTTACTAGTA |
| | | TTTAAAATAAATTCTTAATCAGAGGAGGCCTTTGGGTTTTAT |
| | | TGGTCAAATCTTTGTAAGCTGGCTTTTG |
| | | TCTTTTTAAAAAATTTCTTGAATTTGTGGTTGTGTCCAATTT |
| | | GCAAACATTTCCAAAAATGTTTGCTTTG |
| | | CTTACAAACCACATGATTTTAATGTTTTTTGTATACCATAAT |
| | | ATCTAGCCCCAAACATTTGATTACTACA |
| | | TGTGCATTGGTGATTTTGATCATCCATTCTTAATATTTGATT |
| | | TCTGTGTCACCTACTGTCATTTGTTAAA |
| | | CTGCTGGCCAACAAGAACAGGAAGTATAGTTTGGGGGGTTG |
| | | GGGAGAGTTTACATAAGGAAGAGAAGAAA |
| | | TTGAGTGGCATATTGTAAATATCAGATCTATAATTGTAAAT |
| | | ATAAAACCTGCCTCAGTTAGAATGAATGG |
| | | AAAGCAGATCTACAATTTGCTAATATAGGAATATCAGGTTG |
| | | ACTATATAGCCATACTTGAAAATGCTTCT |
| | | GAGTGGTGTCAACTTTACTTGAATGAATTTTTCATCTTGATT |
| | | GACGCACAGTGATGTACAGTTCACTTCT |
| | | GAAGCTAGTGGTTAACTTGTGTAGGAAACTTTTGCAGTTTG |
| | | ACACTAAGATAACTTCTGTGTGCATTTTT |
| | | CTATGCTTTTTTAAAAACTAGTTTCATTTCATTTTCATGAGA |
| | | TGTTTGGTTTATAAGATCTGAGGATGGT |
| | | TATAAATACTGTAAGTATTGTAATGTTATGAATGCAGGTTA |
| | | TTTGAAAGCTGTTTATTATTATATCATTC |
| | | CTGATAATGCTATGTGAGTGTTTTTAATAAAATTTATATTTA |
| | | TTTAATGCACTCTAA |
| PPREDICTED: | XXM_006714242.2 | GTAGAGAAGCAGAAGGAAGCAAGATGGCTGCCCTTTAGGA |
| Homo sapiens | | TTTGTTAGAAAGGAGACCCGACTGCAACTG |
| tet | | CTGGATTGCTGCAAGGCTGAGGGACGAGAACGAGGCTGGC |
| methylcytosine | | AAACATTCAGCAGCACACCCTCTCAAGATT |
| dioxygenase 2 | | GTTTACTTGCCTTTGCTCCTGTTGAGTTACAACGCTTGGAAG |
| (TET2), | | CAGGAGATGGGCTCAGCAGCAGCCAATA |
| transcript | | GGACATGATCCAGGAAGAGCAGTAAGGGACTGAGCTGCTG |
| variant X2, | | AATTCAACTAGAGGGCAGCCTTGTGGATGG |
| mRNA | | CCCCGAAGCAAGCCTGATGGAACAGGATAGAACCAACCAT |
| [SEQ ID NO: | | GTTGAGGGCAACAGACTAAGTCCATTCCTG |
| 1360] | | ATACCATCACCTCCCATTTGCCAGACAGAACCTCTGGCTAC |
| | | AAAGCTCCAGAATGGAAGCCCACTGCCTG |
| | | AGAGAGCTCATCCAGAAGTAAATGGAGACACCAAGTGGCA |
| | | CTCTTTCAAAAGTTATTATGGAATACCCTG |
| | | TATGAAGGGAAGCCAGAATAGTCGTGTGAGTCCTGACTTTA |
| | | CACAAGAAAGTAGAGGGTATTCCAAGTGT |
| | | TTGCAAAATGGAGGAATAAAACGCACAGTTAGTGAACCTTC |
| | | TCTCTCTGGGCTCCTTCAGATCAAGAAAT |
| | | TGAAACAAGACCAAAAGGCTAATGGAGAAAGACGTAACTT |
| | | CGGGGTAAGCCAAGAAAGAAATCCAGGTGA |
| | | AAGCAGTCAACCAAATGTCTCCGATTTGAGTGATAAGAAAG |
| | | AATCTGTGAGTTCTGTAGCCCAAGAAAAT |
| | | GCAGTTAAAGATTTCACCAGTTTTTCAACACATAACTGCAG |
| | | TGGGCCTGAAAATCCAGAGCTTCAGATTC |
| | | TGAATGAGCAGGAGGGGAAAAGTGCTAATTACCATGACAA |
| | | GAACATTGTATTACTTAAAAACAAGGCAGT |
| | | GCTAATGCCTAATGGTGCTACAGTTTCTGCCTCTTCCGTGGA |
| | | ACACACACATGGTGAACTCCTGGAAAAA |
| | | ACACTGTCTCAATATTATCCAGATTGTGTTTCCATTGCGGTG |
| | | CAGAAAACCACATCTCACATAAATGCCA |
| | | TTAACAGTCAGGCTACTAATGAGTTGTCCTGTGAGATCACT |
| | | CACCCATCGCATACCTCAGGGCAGATCAA |
| | | TTCCGCACAGACCTCTAACTCTGAGCTGCCTCCAAAGCCAG |
| | | CTGCAGTGGTGAGTGAGGCCTGTGATGCT |
| | | GATGATGCTGATAATGCCAGTAAACTAGCTGCAATGCTAAA |
| | | TACCTGTTCCTTTCAGAAACCAGAACAAC |
| | | TACAACAACAAAAATCAGTTTTTGAGATATGCCCATCTCCT |
| | | GCAGAAAATAACATCCAGGGAACCACAAA |
| | | GCTAGCGTCTGGTGAAGAATTCTGTTCAGGTTCCAGCAGCA |
| | | ATTTGCAAGCTCCTGGTGGCAGCTCTGAA |
| | | CGGTATTTAAAACAAAATGAAATGAATGGTGCTTACTTCAA |
| | | GCAAAGCTCAGTGTTCACTAAGGATTCCT |
| | | TTTCTGCCACTACCACACCACCACCACCATCACAATTGCTTC |
| | | TTTCTCCCCCTCCTCCTCTTCCACAGGT |
| | | TCCTCAGCTTCCTTCAGAAGGAAAAAGCACTCTGAATGGTG |
| | | GAGTTTTAGAAGAACACCACCACTACCCC |
| | | AACCAAAGTAACACAACACTTTTAAGGGAAGTGAAAATAG |
| | | AGGGTAAACCTGAGGCACCACCTTCCCAGA |
| | | GTCCTAATCCATCTACACATGTATGCAGCCCTTCTCCGATGC |
| | | TTTCTGAAAGGCCTCAGAATAATTGTGT |
| | | GAACAGGAATGACATACAGACTGCAGGGACAATGACTGTT |
| | | CCATTGTGTTCTGAGAAAACAAGACCAATG |
| | | TCAGAACACCTCAAGCATAACCCACCAATTTTTGGTAGCAG |
| | | TGGAGAGCTACAGGACAACTGCCAGCAGT |
| | | TGATGAGAAACAAAGAGCAAGAGATTCTGAAGGGTCGAGA |
| | | CAAGGAGCAAACACGAGATCTTGTGCCCCC |
| | | AACACAGCACTATCTGAAACCAGGATGGATTGAATTGAAG |
| | | GCCCCTCGTTTTCACCAAGCGGAATCCCAT |
| | | CTAAAACGTAATGAGGCATCACTGCCATCAATTCTTCAGTA |
| | | TCAACCCAATCTCTCCAATCAAATGACCT |
| | | CCAAACAATACACTGGAAATTCCAACATGCCTGGGGGGCTC |
| | | CCAAGGCAAGCTTACACCCAGAAAACAAC |
| | | ACAGCTGGAGCACAAGTCACAAATGTACCAAGTTGAAATG |
| | | AATCAAGGGCAGTCCCAAGGTACAGTGGAC |
| | | CAACATCTCCAGTTCCAAAAACCCTCACACCAGGTGCACTT |
| | | CTCCAAAACAGACCATTTACCAAAAGCTC |
| | | ATGTGCAGTCACTGTGTGGCACTAGATTTCATTTTCAACAA |
| | | AGAGCAGATTCCCAAACTGAAAAACTTAT |
| | | GTCCCCAGTGTTGAAACAGCACTTGAATCAACAGGCTTCAG |
| | | AGACTGAGCCATTTTCAAACTCACACCTT |
| | | TTGCAACATAAGCCTCATAAACAGGCAGCACAAACACAAC |
| | | CATCCCAGAGTTCACATCTCCCTCAAAACC |
| | | AGCAACAGCAGCAAAAATTACAAATAAAGAATAAAGAGGA |
| | | AATACTCCAGACTTTTCCTCACCCCCAAAG |
| | | CAACAATGATCAGCAAAGAGAAGGATCATTCTTTGGCCAGA |
| | | CTAAAGTGGAAGAATGTTTTCATGGTGAA |
| | | AATCAGTATTCAAAATCAAGCGAGTTCGAGACTCATAATGT |
| | | CCAAATGGGACTGGAGGAAGTACAGAATA |
| | | TAAATCGTAGAAATTCCCCTTATAGTCAGACCATGAAATCA |
| | | AGTGCATGCAAAATACAGGTTTCTTGTTC |
| | | AAACAATACACACCTAGTTTCAGAGAATAAAGAACAGACT |
| | | ACACATCCTGAACTTTTTGCAGGAAACAAG |
| | | ACCCAAAACTTGCATCACATGCAATATTTTCCAAATAATGT |
| | | GATCCCAAAGCAAGATCTTCTTCACAGGT |
| | | GCTTTCAAGAACAGGAGCAGAAGTCACAACAAGCTTCAGTT |
| | | CTACAGGGATATAAAAATAGAAACCAAGA |
| | | TATGTCTGGTCAACAAGCTGCGCAACTTGCTCAGCAAAGGT |
| | | ACTTGATACATAACCATGCAAATGTTTTT |
| | | CCTGTGCCTGACCAGGGAGGAAGTCACACTCAGACCCCTCC |
| | | CCAGAAGGACACTCAAAAGCATGCTGCTC |
| | | TAAGGTGGCATCTCTTACAGAAGCAAGAACAGCAGCAAAC |
| | | ACAGCAACCCCAAACTGAGTCTTGCCATAG |
| | | TCAGATGCACAGGCCAATTAAGGTGGAACCTGGATGCAAG |
| | | CCACATGCCTGTATGCACACAGCACCACCA |
| | | GAAAACAAAACATGGAAAAAGGTAACTAAGCAAGAGAATC |
| | | CACCTGCAAGCTGTGATAATGTGCAGCAAA |
| | | AGAGCATCATTGAGACCATGGAGCAGCATCTGAAGCAGTTT |
| | | CACGCCAAGTCGTTATTTGACCATAAGGC |
| | | TCTTACTCTCAAATCACAGAAGCAAGTAAAAGTTGAAATGT |
| | | CAGGGCCAGTCACAGTTTTGACTAGACAA |
| | | ACCACTGCTGCAGAACTTGATAGCCACACCCCAGCTTTAGA |
| | | GCAGCAAACAACTTCTTCAGAAAAGACAC |
| | | CAACCAAAAGAACAGCTGCTTCTGTTCTCAATAATTTTATA |
| | | GAGTCACCTTCCAAATTACTAGATACTCC |
| | | TATAAAAAATTTATTGGATACACCTGTCAAGACTCAATATG |
| | | ATTTCCCATCTTGCAGATGTGTAGGTTTG |
| | | GACAGAAGGGTAAAGCTATTAGGATTGAAAGAGTCATCTAT |
| | | ACTGGTAAAGAAGGCAAAAGTTCTCAGGG |
| | | ATGTCCTATTGCTAAGTGGGAGAACTTGCGCCTGTCAGGGG |
| | | CTGGATCCAGAAACCTGTGGTGCCTCCTT |
| | | CTCTTTTGGTTGTTCATGGAGCATGTACTACAATGGATGTAA |
| | | GTTTGCCAGAAGCAAGATCCCAAGGAAG |
| | | TTTAAGCTGCTTGGGGATGACCCAAAAGAGGAAGAGAAAC |
| | | TGGAGTCTCATTTGCAAAACCTGTCCACTC |
| | | TTATGGCACCAACATATAAGAAACTTGCACCTGATGCATAT |
| | | AATAATCAGATTGAATATGAACACAGAGC |
| | | ACCAGAGTGCCGTCTGGGTCTGAAGGAAGGCCGTCCATTCT |
| | | CAGGGGTCACTGCATGTTTGGACTTCTGT |
| | | GCTCATGCCCACAGAGACTTGCACAACATGCAGAATGGCAG |
| | | CACATTGGTATGCACTCTCACTAGAGAAG |
| | | ACAATCGAGAATTTGGAGGAAAACCTGAGGATGAGCAGCT |
| | | TCACGTTCTGCCTTTATACAAAGTCTCTGA |
| | | CGTGGATGAGTTTGGGAGTGTGGAAGCTCAGGAGGAGAAA |
| | | AAACGGAGTGGTGCCATTCAGGTACTGAGT |
| | | TCTTTTCGGCGAAAAGTCAGGATGTTAGCAGAGCCAGTCAA |
| | | GACTTGCCGACAAAGGAAACTAGAAGCCA |
| | | AGAAAGCTGCAGCTGAAAAGCTTTCCTCCCTGGAGAACAGC |
| | | TCAAATAAAAATGAAAAGGAAAAGTCAGC |
| | | CCCATCACGTACAAAACAAACTGAAAACGCAAGCCAGGCT |
| | | AAACAGTTGGCAGAACTTTTGCGACTTTCA |
| | | GGACCAGTCATGCAGCAGTCCCAGCAGCCCCAGCCTCTACA |
| | | GAAGCAGCCACCACAGCCCCAGCAGCAGC |
| | | AGAGACCCCAGCAGCAGCAGCCACATCACCCTCAGACAGA |
| | | GTCTGTCAACTCTTATTCTGCTTCTGGATC |
| | | CACCAATCCATACATGAGACGGCCCAATCCAGTTAGTCCTT |
| | | ATCCAAACTCTTCACACACTTCAGATATC |
| | | TATGGAAGCACCAGCCCTATGAACTTCTATTCCACCTCATCT |
| | | CAAGCTGCAGGTTCATATTTGAATTCTT |
| | | CTAATCCCATGAACCCTTACCCTGGGCTTTTGAATCAGAAT |
| | | ACCCAATATCCATCATATCAATGCAATGG |
| | | AAACCTATCAGTGGACAACTGCTCCCCATATCTGGGTTCCT |
| | | ATTCTCCCCAGTCTCAGCCGATGGATCTG |
| | | TATAGGTATCCAAGCCAAGACCCTCTGTCTAAGCTCAGTCT |
| | | ACCACCCATCCATACACTTTACCAGCCAA |
| | | GGTTTGGAAATAGCCAGAGTTTTACATCTAAATACTTAGGT |
| | | TATGGAAACCAAAATATGCAGGGAGATGG |
| | | TTTCAGCAGTTGTACCATTAGACCAAATGTACATCATGTAG |
| | | GGAAATTGCCTCCTTATCCCACTCATGAG |
| | | ATGGATGGCCACTTCATGGGAGCCACCTCTAGATTACCACC |
| | | CAATCTGAGCAATCCAAACATGGACTATA |
| | | AAAATGGTGAACATCATTCACCTTCTCACATAATCCATAAC |
| | | TACAGTGCAGCTCCGGGCATGTTCAACAG |
| | | CTCTCTTCATGCCCTGCATCTCCAAAACAAGGAGAATGACA |
| | | TGCTTTCCCACACAGCTAATGGGTTATCA |
| | | AAGATGCTTCCAGCTCTTAACCATGATAGAACTGCTTGTGT |
| | | CCAAGGAGGCTTACACAAATTAAGTGATG |
| | | CTAATGGTCAGGAAAAGCAGCCATTGGCACTAGTCCAGGGT |
| | | GTGGCTTCTGGTGCAGAGGACAACGATGA |
| | | GGTCTGGTCAGACAGCGAGCAGAGCTTTCTGGATCCTGACA |
| | | TTGGGGGAGTGGCCGTGGCTCCAACTCAT |
| | | GGGTCAATTCTCATTGAGTGTGCAAAGCGTGAGCTGCATGC |
| | | CACAACCCCTTTAAAGAATCCCAATAGGA |
| | | ATCACCCCACCAGGATCTCCCTCGTCTTTTACCAGCATAAG |
| | | AGCATGAATGAGCCAAAACATGGCTTGGC |
| | | TCTTTGGGAAGCCAAAATGGCTGAAAAAGCCCGTGAGAAA |
| | | GAGGAAGAGTGTGAAAAGTATGGCCCAGAC |
| | | TATGTGCCTCAGAAATCCCATGGCAAAAAAGTGAAACGGG |
| | | AGCCTGCTGAGCCACATGAAACTTCAGAGC |
| | | CCACTTACCTGCGTTTCATCAAGTCTCTTGCCGAAAGGACC |
| | | ATGTCCGTGACCACAGACTCCACAGTAAC |
| | | TACATCTCCATATGCCTTCACTCGGGTCACAGGGCCTTACA |
| | | ACAGATATATATGATATCACCCCCTTTTG |
| | | TTGGTTACCTCACTTGAAAAGACCACAACCAACCTGTCAGT |
| | | AGTATAGTTCTCATGACGTGGGCAGTGGG |
| | | GAAAGGTCACAGTATTCATGACAAATGTGGTGGGAAAAAC |
| | | CTCAGCTCACCAGCAACAAAAGAGGTTATC |
| | | TTACCATAGCACTTAATTTTCACTGGCTCCCAAGTGGTCACA |
| | | GATGGCATCTAGGAAAAGACCAAAGCAT |
| | | TCTATGCAAAAAGAAGGTGGGGAAGAAAGTGTTCCGCAAT |
| | | TTACATTTTTAAACACTGGTTCTATTATTG |
| | | GACGAGATGATATGTAAATGTGATCCCCCCCCCCCGCTTAC |
| | | AACTCTACACATCTGTGACCACTTTTAAT |
| | | AATATCAAGTTTGCATAGTCATGGAACACAAATCAAACAAG |
| | | TACTGTAGTATTACAGTGACAGGAATCTT |
| | | AAAATACCATCTGGTGCTGAATATATGATGTACTGAAATAC |
| | | TGGAATTATGGCTTTTTGAAATGCAGTTT |
| | | TTACTGTAATCTTAACTTTTATTTATCAAAATAGCTACAGGA |
| | | AACATGAATAGCAGGAAAACACTGAATT |
| | | TGTTTGGATGTTCTAAGAAATGGTGCTAAGAAAATGGTGTC |
| | | TTTAATAGCTAAAAATTTAATGCCTTTAT |
| | | ATCATCAAGATGCTATCAGTGTACTCCAGTGCCCTTGAATA |
| | | ATAGGGGTACCTTTTCATTCAAGTTTTTA |
| | | TCATAATTACCTATTCTTACACAAGCTTAGTTTTTAAAATGT |
| | | GGACATTTTAAAGGCCTCTGGATTTTGC |
| | | TCATCCAGTGAAGTCCTTGTAGGACAATAAACGTATATATG |
| | | TACATATATACACAAACATGTATATGTGC |
| | | ACACACATGTATATGTATAAATATTTTAAATGGTGTTTTAGA |
| | | AGCACTTTGTCTACCTAAGCTTTGACAA |
| | | CTTGAACAATGCTAAGGTACTGAGATGTTTAAAAAACAAGT |
| | | TTACTTTCATTTTAGAATGCAAAGTTGAT |
| | | TTTTTTAAGGAAACAAAGAAAGCTTTTAAAATATTTTTGCTT |
| | | TTAGCCATGCATCTGCTGATGAGCAATT |
| | | GTGTCCATTTTTAACACAGCCAGTTAAATCCACCATGGGGC |
| | | TTACTGGATTCAAGGGAATACGTTAGTCC |
| | | ACAAAACATGTTTTCTGGTGCTCATCTCACATGCTATACTGT |
| | | AAAACAGTTTTATACAAAATTGTATGAC |
| | | AAGTTCATTGCTCAAAAATGTACAGTTTTAAGAATTTTCTAT |
| | | TAACTGCAGGTAATAATTAGCTGCATGC |
| | | TGCAGACTCAACAAAGCTAGTTCACTGAAGCCTATGCTATT |
| | | TTATGGATCATAGGCTCTTCAGAGAACTG |
| | | AATGGCAGTCTGCCTTTGTGTTGATAATTATGTACATTGTGA |
| | | CGTTGTCATTTCTTAGCTTAAGTGTCCT |
| | | CTTTAACAAGAGGATTGAGCAGACTGATGCCTGCATAAGAT |
| | | GAATAAACAGGGTTAGTTCCATGTGAATC |
| | | TGTCAGTTAAAAAGAAACAAAAACAGGCAGCTGGTTTGCTG |
| | | TGGTGGTTTTAAATCATTAATTTGTATAA |
| | | AGAAGTGAAAGAGTTGTATAGTAAATTAAATTGTAAACAA |
| | | AACTTTTTTAATGCAATGCTTTAGTATTTT |
| | | AGTACTGTAAAAAAATTAAATATATACATATATATATATAT |
| | | ATATATATATATATATATGAGTTTGAAGC |
| | | AGAATTCACATCATGATGGTGCTACTCAGCCTGCTACAAAT |
| | | ATATCATAATGTGAGCTAAGAATTCATTA |
| | | AATGTTTGAGTGATGTTCCTACTTGTCATATACCTCAACACT |
| | | AGTTTGGCAATAGGATATTGAACTGAGA |
| | | GTGAAAGCATTGTGTACCATCATTTTTTTCCAAGTCCTTTTT |
| | | TTTATTGTTAAAAAAAAAAGCATACCTT |
| | | TTTTCAATACTTGATTTCTTAGCAAGTATAACTTGAACTTCA |
| | | ACCTTTTTGTTCTAAAAATTCAGGGATA |
| | | TTTCAGCTCATGCTCTCCCTATGCCAACATGTCACCTGTGTT |
| | | TATGTAAAATTGTTGTAGGTTAATAAAT |
| | | ATATTCTTTGTCAGGGATTTAACCCTTTTATTTTGAATCCCTT |
| | | CTATTTTACTTGTACATGTGCTGATGT |
| | | AACTAAAACTAATTTTGTAAATCTGTTGGCTCTTTTTATTGT |
| | | AAAGAAAAGCATTTTAAAAGTTTGAGGA |
| | | ATCTTTTGACTGTTTCAAGCAGGAAAAAAAAATTACATGAA |
| | | AATAGAATGCACTGAGTTGATAAAGGGAA |
| | | AAATTGTAAGGCAGGAGTTTGGCAAGTGGCTGTTGGCCAGA |
| | | GACTTACTTGTAACTCTCTAAATGAAGTT |
| | | TTTTTGATCCTGTAATCACTGAAGGTACATACTCCATGTGGA |
| | | CTTCCCTTAAACAGGCAAACACCTACAG |
| | | GTATGGTGTGCAACAGATTGTACAATTACATTTTGGCCTAA |
| | | ATACATTTTTGCTTACTAGTATTTAAAAT |
| | | AAATTCTTAATCAGAGGAGGCCTTTGGGTTTTATTGGTCAA |
| | | ATCTTTGTAAGCTGGCTTTTGTCTTTTTA |
| | | AAAAATTTCTTGAATTTGTGGTTGTGTCCAATTTGCAAACAT |
| | | TTCCAAAAATGTTTGCTTTGCTTACAAA |
| | | CCACATGATTTTAATGTTTTTTGTATACCATAATATCTAGCC |
| | | CCAAACATTTGATTACTACATGTGCATT |
| | | GGTGATTTTGATCATCCATTCTTAATATTTGATTTCTGTGTC |
| | | ACCTACTGTCATTTGTTAAACTGCTGGC |
| | | CAACAAGAACAGGAAGTATAGTTTGGGGGGTTGGGGAGAG |
| | | TTTACATAAGGAAGAGAAGAAATTGAGTGG |
| | | CATATTGTAAATATCAGATCTATAATTGTAAATATAAAACC |
| | | TGCCTCAGTTAGAATGAATGGAAAGCAGA |
| | | TCTACAATTTGCTAATATAGGAATATCAGGTTGACTATATA |
| | | GCCATACTTGAAAATGCTTCTGAGTGGTG |
| | | TCAACTTTACTTGAATGAATTTTTCATCTTGATTGACGCACA |
| | | GTGATGTACAGTTCACTTCTGAAGCTAG |
| | | TGGTTAACTTGTGTAGGAAACTTTTGCAGTTTGACACTAAG |
| | | ATAACTTCTGTGTGCATTTTTCTATGCTT |
| | | TTTTAAAAACTAGTTTCATTTCATTTTCATGAGATGTTTGGT |
| | | TTATAAGATCTGAGGATGGTTATAAATA |
| | | CTGTAAGTATTGTAATGTTATGAATGCAGGTTATTTGAAAG |
| | | CTGTTTATTATTATATCATTCCTGATAAT |
| | | GCTATGTGAGTGTTTTTAATAAAATTTATATTTATTTAATGC |
| | | ACTCTAA |
| HHomo sapiens | NM_017628.4 | AAACAGAAGGTGGGCCGGGGCGGGGAGAAACAGAACTCGG |
| tet | | TCAATTTCCCAGTTTGTCGGGTCTTTAAAA |
| methylcytosine | | ATACAGGCCCCTAAAGCACTAAGGGCATGCCCTCGGTGAAA |
| dioxygenase 2 | | CAGGGGAGCGCTTCTGCTGAATGAGATTA |
| (TET2), | | AAGCGACAGAAAAGGGAAAGGAGAGCGCGGGCAACGGGA |
| transcript | | TCTAAAGGGAGATAGAGACGCGGGCCTCTGA |
| variant 2, | | GGGCTGGCAAACATTCAGCAGCACACCCTCTCAAGATTGTT |
| mRNA | | TACTTGCCTTTGCTCCTGTTGAGTTACAA |
| [SEQ ID NO: | | CGCTTGGAAGCAGGAGATGGGCTCAGCAGCAGCCAATAGG |
| 1361] | | ACATGATCCAGGAAGAGCAGTAAGGGACTG |
| | | AGCTGCTGAATTCAACTAGAGGGCAGCCTTGTGGATGGCCC |
| | | CGAAGCAAGCCTGATGGAACAGGATAGAA |
| | | CCAACCATGTTGAGGGCAACAGACTAAGTCCATTCCTGATA |
| | | CCATCACCTCCCATTTGCCAGACAGAACC |
| | | TCTGGCTACAAAGCTCCAGAATGGAAGCCCACTGCCTGAGA |
| | | GAGCTCATCCAGAAGTAAATGGAGACACC |
| | | AAGTGGCACTCTTTCAAAAGTTATTATGGAATACCCTGTAT |
| | | GAAGGGAAGCCAGAATAGTCGTGTGAGTC |
| | | CTGACTTTACACAAGAAAGTAGAGGGTATTCCAAGTGTTTG |
| | | CAAAATGGAGGAATAAAACGCACAGTTAG |
| | | TGAACCTTCTCTCTCTGGGCTCCTTCAGATCAAGAAATTGAA |
| | | ACAAGACCAAAAGGCTAATGGAGAAAGA |
| | | CGTAACTTCGGGGTAAGCCAAGAAAGAAATCCAGGTGAAA |
| | | GCAGTCAACCAAATGTCTCCGATTTGAGTG |
| | | ATAAGAAAGAATCTGTGAGTTCTGTAGCCCAAGAAAATGCA |
| | | GTTAAAGATTTCACCAGTTTTTCAACACA |
| | | TAACTGCAGTGGGCCTGAAAATCCAGAGCTTCAGATTCTGA |
| | | ATGAGCAGGAGGGGAAAAGTGCTAATTAC |
| | | CATGACAAGAACATTGTATTACTTAAAAACAAGGCAGTGCT |
| | | AATGCCTAATGGTGCTACAGTTTCTGCCT |
| | | CTTCCGTGGAACACACACATGGTGAACTCCTGGAAAAAACA |
| | | CTGTCTCAATATTATCCAGATTGTGTTTC |
| | | CATTGCGGTGCAGAAAACCACATCTCACATAAATGCCATTA |
| | | ACAGTCAGGCTACTAATGAGTTGTCCTGT |
| | | GAGATCACTCACCCATCGCATACCTCAGGGCAGATCAATTC |
| | | CGCACAGACCTCTAACTCTGAGCTGCCTC |
| | | CAAAGCCAGCTGCAGTGGTGAGTGAGGCCTGTGATGCTGAT |
| | | GATGCTGATAATGCCAGTAAACTAGCTGC |
| | | AATGCTAAATACCTGTTCCTTTCAGAAACCAGAACAACTAC |
| | | AACAACAAAAATCAGTTTTTGAGATATGC |
| | | CCATCTCCTGCAGAAAATAACATCCAGGGAACCACAAAGCT |
| | | AGCGTCTGGTGAAGAATTCTGTTCAGGTT |
| | | CCAGCAGCAATTTGCAAGCTCCTGGTGGCAGCTCTGAACGG |
| | | TATTTAAAACAAAATGAAATGAATGGTGC |
| | | TTACTTCAAGCAAAGCTCAGTGTTCACTAAGGATTCCTTTTC |
| | | TGCCACTACCACACCACCACCACCATCA |
| | | CAATTGCTTCTTTCTCCCCCTCCTCCTCTTCCACAGGTTCCTC |
| | | AGCTTCCTTCAGAAGGAAAAAGCACTC |
| | | TGAATGGTGGAGTTTTAGAAGAACACCACCACTACCCCAAC |
| | | CAAAGTAACACAACACTTTTAAGGGAAGT |
| | | GAAAATAGAGGGTAAACCTGAGGCACCACCTTCCCAGAGT |
| | | CCTAATCCATCTACACATGTATGCAGCCCT |
| | | TCTCCGATGCTTTCTGAAAGGCCTCAGAATAATTGTGTGAA |
| | | CAGGAATGACATACAGACTGCAGGGACAA |
| | | TGACTGTTCCATTGTGTTCTGAGAAAACAAGACCAATGTCA |
| | | GAACACCTCAAGCATAACCCACCAATTTT |
| | | TGGTAGCAGTGGAGAGCTACAGGACAACTGCCAGCAGTTG |
| | | ATGAGAAACAAAGAGCAAGAGATTCTGAAG |
| | | GGTCGAGACAAGGAGCAAACACGAGATCTTGTGCCCCCAA |
| | | CACAGCACTATCTGAAACCAGGATGGATTG |
| | | AATTGAAGGCCCCTCGTTTTCACCAAGCGGAATCCCATCTA |
| | | AAACGTAATGAGGCATCACTGCCATCAAT |
| | | TCTTCAGTATCAACCCAATCTCTCCAATCAAATGACCTCCAA |
| | | ACAATACACTGGAAATTCCAACATGCCT |
| | | GGGGGGCTCCCAAGGCAAGCTTACACCCAGAAAACAACAC |
| | | AGCTGGAGCACAAGTCACAAATGTACCAAG |
| | | TTGAAATGAATCAAGGGCAGTCCCAAGGTACAGTGGACCA |
| | | ACATCTCCAGTTCCAAAAACCCTCACACCA |
| | | GGTGCACTTCTCCAAAACAGACCATTTACCAAAAGCTCATG |
| | | TGCAGTCACTGTGTGGCACTAGATTTCAT |
| | | TTTCAACAAAGAGCAGATTCCCAAACTGAAAAACTTATGTC |
| | | CCCAGTGTTGAAACAGCACTTGAATCAAC |
| | | AGGCTTCAGAGACTGAGCCATTTTCAAACTCACACCTTTTG |
| | | CAACATAAGCCTCATAAACAGGCAGCACA |
| | | AACACAACCATCCCAGAGTTCACATCTCCCTCAAAACCAGC |
| | | AACAGCAGCAAAAATTACAAATAAAGAAT |
| | | AAAGAGGAAATACTCCAGACTTTTCCTCACCCCCAAAGCAA |
| | | CAATGATCAGCAAAGAGAAGGATCATTCT |
| | | TTGGCCAGACTAAAGTGGAAGAATGTTTTCATGGTGAAAAT |
| | | CAGTATTCAAAATCAAGCGAGTTCGAGAC |
| | | TCATAATGTCCAAATGGGACTGGAGGAAGTACAGAATATA |
| | | AATCGTAGAAATTCCCCTTATAGTCAGACC |
| | | ATGAAATCAAGTGCATGCAAAATACAGGTTTCTTGTTCAAA |
| | | CAATACACACCTAGTTTCAGAGAATAAAG |
| | | AACAGACTACACATCCTGAACTTTTTGCAGGAAACAAGACC |
| | | CAAAACTTGCATCACATGCAATATTTTCC |
| | | AAATAATGTGATCCCAAAGCAAGATCTTCTTCACAGGTGCT |
| | | TTCAAGAACAGGAGCAGAAGTCACAACAA |
| | | GCTTCAGTTCTACAGGGATATAAAAATAGAAACCAAGATAT |
| | | GTCTGGTCAACAAGCTGCGCAACTTGCTC |
| | | AGCAAAGGTACTTGATACATAACCATGCAAATGTTTTTCCT |
| | | GTGCCTGACCAGGGAGGAAGTCACACTCA |
| | | GACCCCTCCCCAGAAGGACACTCAAAAGCATGCTGCTCTAA |
| | | GGTGGCATCTCTTACAGAAGCAAGAACAG |
| | | CAGCAAACACAGCAACCCCAAACTGAGTCTTGCCATAGTCA |
| | | GATGCACAGGCCAATTAAGGTGGAACCTG |
| | | GATGCAAGCCACATGCCTGTATGCACACAGCACCACCAGAA |
| | | AACAAAACATGGAAAAAGGTAACTAAGCA |
| | | AGAGAATCCACCTGCAAGCTGTGATAATGTGCAGCAAAAG |
| | | AGCATCATTGAGACCATGGAGCAGCATCTG |
| | | AAGCAGTTTCACGCCAAGTCGTTATTTGACCATAAGGCTCT |
| | | TACTCTCAAATCACAGAAGCAAGTAAAAG |
| | | TTGAAATGTCAGGGCCAGTCACAGTTTTGACTAGACAAACC |
| | | ACTGCTGCAGAACTTGATAGCCACACCCC |
| | | AGCTTTAGAGCAGCAAACAACTTCTTCAGAAAAGACACCAA |
| | | CCAAAAGAACAGCTGCTTCTGTTCTCAAT |
| | | AATTTTATAGAGTCACCTTCCAAATTACTAGATACTCCTATA |
| | | AAAAATTTATTGGATACACCTGTCAAGA |
| | | CTCAATATGATTTCCCATCTTGCAGATGTGTAGGTAAGTGCC |
| | | AGAAATGTACTGAGACACATGGCGTTTA |
| | | TCCAGAATTAGCAAATTTATCTTCAGATATGGGATTTTCCTT |
| | | CTTTTTTTAAATCTTGAGTCTGGCAGCA |
| | | ATTTGTAAAGGCTCATAAAAATCTGAAGCTTACATTTTTTGT |
| | | CAAGTTACCGATGCTTGTGTCTTGTGAA |
| | | AGAGAACTTCACTTACATGCAGTTTTTCCAAAAGAATTAAA |
| | | TAATCGTGCATGTTTATTTTTCCCTCTCT |
| | | TCAGATCCTGTAAAATTTGAATGTATCTGTTTTAGATCAATT |
| | | CGCCTATTTAGCTCTTTGTATATTATCT |
| | | CCTGGAGAGACAGCTAGGCAGCAAAAAAACAATCTATTAA |
| | | AATGAGAAAATAACGACCATAGGCAGTCTA |
| | | ATGTACGAACTTTAAATATTTTTTAATTCAAGGTAAAATATA |
| | | TTAGTTTCACAAGATTTCTGGCTAATAG |
| | | GGAAATTATTATCTTCAGTCTTCATGAGTTGGGGGAAATGA |
| | | TAATGCTGACACTCTTAGTGCTCCTAAAG |
| | | TTTCCTTTTCTCCATTTATACATTTGGAATGTTGTGATTTATA |
| | | TTCATTTTGATTCCCTTTTCTCTAAAA |
| | | TTTCATCTTTTTGATTAAAAAATATGATACAGGCATACCTCA |
| | | GAGATATTGTGGGTTTGGCTCCATACCA |
| | | CAATAAAATGAATATTACAATAAAGCAAGTTGTAAGGACTT |
| | | TTTGGTTTCTCACTGTATGTAAAAGTTAT |
| | | TTATATACTATACTGTAACATACTAAGTGTGCAATAGCATT |
| | | GTGTCTAAAAAATATATACTTTAAAAATA |
| | | ATTTATTGTTAAAAAAATGCCAACAATTATCTGGGCCTTTA |
| | | GTGAGTGCTAATCTTTTTGCTGGTGGAGG |
| | | GTCGTGCTTCAGTATTGATCGCTGTGGACTGATCATGGTGGT |
| | | AGTTGCTGAAGGTTGCTGGGATGGCTGT |
| | | GTGTGTGGCAATTTCTTAAAATAAGACAACAGTGAAGTGCT |
| | | GTATCAATTGATTTTTCCATTCACAAAAG |
| | | ATTTCTCTGTAGCATGCAATGCTGTTTGATAGCATTTAACCC |
| | | ACAGCAGAATTTCTTTGAAAATTGGACT |
| | | CAGTCCTCTCAAACTGTGCTGCTGCTTTATCAACTAAGTTTT |
| | | TGTAATTTTCTGAATCCTTTGTTGTCAT |
| | | TTCAGCAGTTTACAGCATCTTCATTGGAAGTATATTCCATCT |
| | | CAAACATTCTTTGTTCATCCATAAGAAG |
| | | CAACTTCTTATCAAGTTTTTTCATGACATTGCAGTAACTCAG |
| | | CCCCATCTTCAGGCTCTACTTCTAATTC |
| | | TGGTTCTCTTGCTACATCTCCCTCATCTGCAGTGACCTCTCC |
| | | ACGGAAGTCTTGAACTCCTCAAAGTAAT |
| | | CCATGAGGGTTGGAATCAACTTCTAAACTCCTGTTAATGTT |
| | | GATATATTGACCCCCTCCCATGAATTATG |
| | | AATGTTCTTAATAACTTCTAAATGGTGATACCTTTCCAGAAG |
| | | GCTTTCAATGTACTTTGCCCGGATCCAT |
| | | CAGAAGACTATCTTGGCAGCTGTAGACTAACAATATATTTC |
| | | TTAAATGATAAGACTTGAAAGTCAAAAGT |
| | | ACTCCTTAATCCATAGGCTGCAGAATCAATGTTGTATTAAC |
| | | AGGCACGAAAACAGCATTAATCTTGTGCA |
| | | TCTCCATCGGAGCTCTTGGGTGACTAGGTGCCTTGAGCAGT |
| | | AATATTTTGAAAGGAGGTTTTGGTTTTGT |
| | | TTTTTGTTTTTTTTTTTTGTTTTTTAGCAGTAAGTCTCAACAC |
| | | TGGGCTTAAAATATTCAGTAAACTATG |
| | | TTGTAAAAAGATGTGTTATCATCCAGACTTTGTTGTTCCATT |
| | | ACTCTACACAAGCAGGGTACACTTAGCA |
| | | TAATTCTTAAGGGCCTTGGAATTTTCAGAATGGTAAATGAG |
| | | TATGGGCTTCAACTTAAAATCATCAACTG |
| | | CATTAGCCTGTAACAAGAGAGTCAGCCTGTCCTTTGAAGCA |
| | | AGGCATTGACTTCTATCTATGAAAGTCTT |
| | | AGATGGCACCTTGTTTCAATAGTAGGCTGTTTAGTACAGCC |
| | | ACCTTCATCAGTGATCTTAGCTAGATCTT |
| | | CTGCATAACTTGCTGCAGCTTCTACATCAGCACTTGCTGCCT |
| | | CACCTTGTCCTTTTATGTTATAGAGACA |
| | | GCTGCGCTTCTTAAACTTTATAAACCAACTTCTGCTAGCTTC |
| | | CAACTTCTCTTCTGCAGCTTCCTCATTC |
| | | TCTTCATAGAACTGAAGGGAGTCAAGGCCTTGCTCTGGATT |
| | | AAGCTTTGGCTTAAGGAATGTTGTGGCTG |
| | | ACGTGATCTTCTATCCAGACCACTAAAGCGCTCTCCATATC |
| | | AGCAATAAGGCCGTTTTGCTTTCTTACCT |
| | | TTCATGTGTTCACTGGAGTAATTTCCTTCAAGAATTTTTCCT |
| | | TTACATTCACAACTTGGCTAACTGGCAT |
| | | GCAAGGCCTAGCTTTCAGCCTGTCTTGGCTTTTGACATGCCT |
| | | TCCTCACTTAGCTCGTCATATCTAGCTT |
| | | TTGATTTAAAGTGGCAGGCATACAACTCTTCCTTTCACTTGA |
| | | ACACTTAGAGGCCACTGTAGGGTTATTA |
| | | ATTGGCCTAATTTCAATATTGTTGTGTTTTAGGGAATAGAGA |
| | | GGCCCAGGGAGAGGGAGAGAGCCCAAAC |
| | | GGCTGGTTGATAGAGCAGGCAGAATGCACACAACATTTATC |
| | | AGATTATGTTTGCACCATTTACCAGATTA |
| | | TGGGTACGGTTTGTGGCACCCCCCAAAAATTAGAATAGTAA |
| | | CATCAAAGATCACTGATCACAGATCGCCA |
| | | TAACATAAATAATAATAAACTTTAAAATACTGTGAGAATTA |
| | | CCAAAATGTGATACAGAGACATGAAGTGA |
| | | GCACATGCTGTTGAAAAAAATGACACTGATAGACATACTTA |
| | | ACACGTGGGATTGCCACAAACCTTCAGTT |
| | | TGTAAAAGTCACAGTAACTGTGACTCACAAAAGAACAAAG |
| | | CACAATAAAACGAGGTATGCCTGTATTTTT |
| | | AAAAAAAGCTTTTTGTTAAAATTCAGGATATGTAATAGGTC |
| | | TGTAGGAATAGTGAAATATTTTTGCTGAT |
| | | GGATGTAGATATATACGTGGATAGAGATGAAGATCTTAATT |
| | | ATAGCTATGCAGCATAGATTTAGTCAAAG |
| | | ACATTTGAAAAGACAAATGTTAAATTAGTGTGGCTAATGAC |
| | | CTACCCGTGCCATGTTTTCCCTCTTGCAA |
| | | TGAGATACCCCACACTGTGTAGAAGGATGGAGGGAGGACT |
| | | CCTACTGTCCCTCTTTGCGTGTGGTTATTA |
| | | AGTTGCCTCACTGGGCTAAAACACCACACATCTCATAGATA |
| | | ATATTTGGTAAGTTGTAATCGTCTTCACT |
| | | CTTCTCTTATCACCCACCCCTATCTTCCCACTTTTCCATCTTT |
| | | GTTGGTTTGCAACAGCCCCTTCTTTTT |
| | | GCCTGACTCTCCAGGATTTTCTCTCATCATAAATTGTTCTAA |
| | | AGTACATACTAATATGGGTCTGGATTGA |
| | | CTATTCTTATTTGCAAAACAGCAATTAAATGTTATAGGGAA |
| | | GTAGGAAGAAAAAGGGGTATCCTTGACAA |
| | | TAAACCAAGCAATATTCTGGGGGTGGGATAGAGCAGGAAA |
| | | TTTTATTTTTAATCTTTTAAAATCCAAGTA |
| | | ATAGGTAGGCTTCCAGTTAGCTTTAAATGTTTTTTTTTTCCA |
| | | GCTCAAAAAATTGGATTGTAGTTGATAC |
| | | TACATATAATACATTCTAATTCCCTCACTGTATTCTTTGTTT |
| | | AGTTTCATTTATTTGGTTTAAAATAATT |
| | | TTTTATCCCATATCTGAAATGTAATATATTTTTATCCAACAA |
| | | CCAGCATGTACATATACTTAATTATGTG |
| | | GCACATTTTCTAATAGATCAGTCCATCAATCTACTCATTTTA |
| | | AAGAAAAAAAAATTTTAAAGTCACTTTT |
| | | AGAGCCCTTAATGTGTAGTTGGGGGTTAAGCTTTGTGGATG |
| | | TAGCCTTTATATTTAGTATAATTGAGGTC |
| | | TAAAATAATAATCTTCTATTATCTCAACAGAGCAAATTATT |
| | | GAAAAAGATGAAGGTCCTTTTTATACCCA |
| | | TCTAGGAGCAGGTCCTAATGTGGCAGCTATTAGAGAAATCA |
| | | TGGAAGAAAGGTAATTAACGCAAAGGCAC |
| | | AGGGCAGATTAACGTTTATCCTTTTGTATATGTCAGAATTTT |
| | | TCCAGCCTTCACACACAAAGCAGTAAAC |
| | | AATTGTAAATTGAGTAATTATTAGTAGGCTTAGCTATTCTAG |
| | | GGTTGCCAACACTACACACTGTGCTATT |
| | | CACCAGAGAGTCACAATATTTGACAGGACTAATAGTCTGCT |
| | | AGCTGGCACAGGCTGCCCACTTTGCGATG |
| | | GATGCCAGAAAACCCAGGCATGAACAGGAATCGGCCAGCC |
| | | AGGCTGCCAGCCACAAGGTACTGGCACAGG |
| | | CTCCAACGAGAGGTCCCACTCTGGCTTTCCCACCTGATAAT |
| | | AAAGTGTCAAAGCAGAAAGACTGGTAAAG |
| | | TGTGGTATAAGAAAAGAACCACTGAATTAAATTCACCTAGT |
| | | GTTGCAAATGAGTACTTATCTCTAAGTTT |
| | | TCTTTTACCATAAAAAGAGAGCAAGTGTGATATGTTGAATA |
| | | GAAAGAGAAACATACTATTTACAGCTGCC |
| | | TTTTTTTTTTTTTTTCGCTATCAATCACAGGTATACAAGTACT |
| | | TGCCTTTACTCCTGCATGTAGAAGACT |
| | | CTTATGAGCGAGATAATGCAGAGAAGGCCTTTCATATAAAT |
| | | TTATACAGCTCTGAGCTGTTCTTCTTCTA |
| | | GGGTGCCTTTTCATTAAGAGGTAGGCAGTATTATTATTAAA |
| | | GTACTTAGGATACATTGGGGCAGCTAGGA |
| | | CATATTCAGTATCATTCTTGCTCCATTTCCAAATTATTCATTT |
| | | CTAAATTAGCATGTAGAAGTTCACTAA |
| | | ATAATCATCTAGTGGCCTGGCAGAAATAGTGAATTTCCCTA |
| | | AGTGCCTTTTTTTTGTTGTTTTTTTGTTT |
| | | TGTTTTTTAAACAAGCAGTAGGTGGTGCTTTGGTCATAAGG |
| | | GAAGATATAGTCTATTTCTAGGACTATTC |
| | | CATATTTTCCATGTGGCTGGATACTAACTATTTGCCAGCCTC |
| | | CTTTTCTAAATTGTGAGACATTCTTGGA |
| | | GGAACAGTTCTAACTAAAATCTATTATGACTCCCCAAGTTTT |
| | | AAAATAGCTAAATTTAGTAAGGGAAAAA |
| | | ATAGTTTATGTTTTAGAAGACTGAACTTAGCAAACTAACCT |
| | | GAATTTTGTGCTTTGTGAAATTTTATATC |
| | | GAAATGAGCTTTCCCATTTTCACCCACATGTAATTTACAAA |
| | | ATAGTTCATTACAATTATCTGTACATTTT |
| | | GATATTGAGGAAAAACAAGGCTTAAAAACCATTATCCAGTT |
| | | TGCTTGGCGTAGACCTGTTTAAAAAATAA |
| | | TAAACCGTTCATTTCTCAGGATGTGGTCATAGAATAAAGTT |
| | | ATGCTCAAATGTTCAAATATTTAAA |
| PPREDICTED: | XXM_011532044.1 | TCAGGCTCTACTTCTAATTCTGGTTCTCTTGCTACATCTCCCT |
| Homo sapiens | | CATCTGCAGTGACCTCTCCACGGAAGT |
| tet | | CTTGAACTCCTCAAAAGCAAATTATTGAAAAAGATGAAGGT |
| methylcytosine | | CCTTTTTATACCCATCTAGGAGCAGGTCC |
| dioxygenase 2 | | TAATGTGGCAGCTATTAGAGAAATCATGGAAGAAAGGTTTG |
| (TET2), | | GACAGAAGGGTAAAGCTATTAGGATTGAA |
| transcript | | AGAGTCATCTATACTGGTAAAGAAGGCAAAAGTTCTCAGGG |
| variant X9, | | ATGTCCTATTGCTAAGTGGGTGGTTCGCA |
| mRNA | | GAAGCAGCAGTGAAGAGAAGCTACTGTGTTTGGTGCGGGA |
| [SEQ ID NO: | | GCGAGCTGGCCACACCTGTGAGGCTGCAGT |
| 1362] | | GATTGTGATTCTCATCCTGGTGTGGGAAGGAATCCCGCTGT |
| | | CTCTGGCTGACAAACTCTACTCGGAGCTT |
| | | ACCGAGACGCTGAGGAAATACGGCACGCTCACCAATCGCC |
| | | GGTGTGCCTTGAATGAAGAGAGAACTTGCG |
| | | CCTGTCAGGGGCTGGATCCAGAAACCTGTGGTGCCTCCTTC |
| | | TCTTTTGGTTGTTCATGGAGCATGTACTA |
| | | CAATGGATGTAAGTTTGCCAGAAGCAAGATCCCAAGGAAG |
| | | TTTAAGCTGCTTGGGGATGACCCAAAAGAG |
| | | GAAGAGAAACTGGAGTCTCATTTGCAAAACCTGTCCACTCT |
| | | TATGGCACCAACATATAAGAAACTTGCAC |
| | | CTGATGCATATAATAATCAGATTGAATATGAACACAGAGCA |
| | | CCAGAGTGCCGTCTGGGTCTGAAGGAAGG |
| | | CCGTCCATTCTCAGGGGTCACTGCATGTTTGGACTTCTGTGC |
| | | TCATGCCCACAGAGACTTGCACAACATG |
| | | CAGAATGGCAGCACATTGGTATGCACTCTCACTAGAGAAGA |
| | | CAATCGAGAATTTGGAGGAAAACCTGAGG |
| | | ATGAGCAGCTTCACGTTCTGCCTTTATACAAAGTCTCTGACG |
| | | TGGATGAGTTTGGGAGTGTGGAAGCTCA |
| | | GGAGGAGAAAAAACGGAGTGGTGCCATTCAGGTACTGAGT |
| | | TCTTTTCGGCGAAAAGTCAGGATGTTAGCA |
| | | GAGCCAGTCAAGACTTGCCGACAAAGGAAACTAGAAGCCA |
| | | AGAAAGCTGCAGCTGAAAAGCTTTCCTCCC |
| | | TGGAGAACAGCTCAAATAAAAATGAAAAGGAAAAGTCAGC |
| | | CCCATCACGTACAAAACAAACTGAAAACGC |
| | | AAGCCAGGCTAAACAGTTGGCAGAACTTTTGCGACTTTCAG |
| | | GACCAGTCATGCAGCAGTCCCAGCAGCCC |
| | | CAGCCTCTACAGAAGCAGCCACCACAGCCCCAGCAGCAGC |
| | | AGAGACCCCAGCAGCAGCAGCCACATCACC |
| | | CTCAGACAGAGTCTGTCAACTCTTATTCTGCTTCTGGATCCA |
| | | CCAATCCATACATGAGACGGCCCAATCC |
| | | AGTTAGTCCTTATCCAAACTCTTCACACACTTCAGATATCTA |
| | | TGGAAGCACCAGCCCTATGAACTTCTAT |
| | | TCCACCTCATCTCAAGCTGCAGGTTCATATTTGAATTCTTCT |
| | | AATCCCATGAACCCTTACCCTGGGCTTT |
| | | TGAATCAGAATACCCAATATCCATCATATCAATGCAATGGA |
| | | AACCTATCAGTGGACAACTGCTCCCCATA |
| | | TCTGGGTTCCTATTCTCCCCAGTCTCAGCCGATGGATCTGTA |
| | | TAGGTATCCAAGCCAAGACCCTCTGTCT |
| | | AAGCTCAGTCTACCACCCATCCATACACTTTACCAGCCAAG |
| | | GTTTGGAAATAGCCAGAGTTTTACATCTA |
| | | AATACTTAGGTTATGGAAACCAAAATATGCAGGGAGATGGT |
| | | TTCAGCAGTTGTACCATTAGACCAAATGT |
| | | ACATCATGTAGGGAAATTGCCTCCTTATCCCACTCATGAGA |
| | | TGGATGGCCACTTCATGGGAGCCACCTCT |
| | | AGATTACCACCCAATCTGAGCAATCCAAACATGGACTATAA |
| | | AAATGGTGAACATCATTCACCTTCTCACA |
| | | TAATCCATAACTACAGTGCAGCTCCGGGCATGTTCAACAGC |
| | | TCTCTTCATGCCCTGCATCTCCAAAACAA |
| | | GGAGAATGACATGCTTTCCCACACAGCTAATGGGTTATCAA |
| | | AGATGCTTCCAGCTCTTAACCATGATAGA |
| | | ACTGCTTGTGTCCAAGGAGGCTTACACAAATTAAGTGATGC |
| | | TAATGGTCAGGAAAAGCAGCCATTGGCAC |
| | | TAGTCCAGGGTGTGGCTTCTGGTGCAGAGGACAACGATGAG |
| | | GTCTGGTCAGACAGCGAGCAGAGCTTTCT |
| | | GGATCCTGACATTGGGGGAGTGGCCGTGGCTCCAACTCATG |
| | | GGTCAATTCTCATTGAGTGTGCAAAGCGT |
| | | GAGCTGCATGCCACAACCCCTTTAAAGAATCCCAATAGGAA |
| | | TCACCCCACCAGGATCTCCCTCGTCTTTT |
| | | ACCAGCATAAGAGCATGAATGAGCCAAAACATGGCTTGGC |
| | | TCTTTGGGAAGCCAAAATGGCTGAAAAAGC |
| | | CCGTGAGAAAGAGGAAGAGTGTGAAAAGTATGGCCCAGAC |
| | | TATGTGCCTCAGAAATCCCATGGCAAAAAA |
| | | GTGAAACGGGAGCCTGCTGAGCCACATGAAACTTCAGAGC |
| | | CCACTTACCTGCGTTTCATCAAGTCTCTTG |
| | | CCGAAAGGACCATGTCCGTGACCACAGACTCCACAGTAACT |
| | | ACATCTCCATATGCCTTCACTCGGGTCAC |
| | | AGGGCCTTACAACAGATATATATGATATCACCCCCTTTTGTT |
| | | GGTTACCTCACTTGAAAAGACCACAACC |
| | | AACCTGTCAGTAGTATAGTTCTCATGACGTGGGCAGTGGGG |
| | | AAAGGTCACAGTATTCATGACAAATGTGG |
| | | TGGGAAAAACCTCAGCTCACCAGCAACAAAAGAGGTTATCT |
| | | TACCATAGCACTTAATTTTCACTGGCTCC |
| | | CAAGTGGTCACAGATGGCATCTAGGAAAAGACCAAAGCAT |
| | | TCTATGCAAAAAGAAGGTGGGGAAGAAAGT |
| | | GTTCCGCAATTTACATTTTTAAACACTGGTTCTATTATTGGA |
| | | CGAGATGATATGTAAATGTGATCCCCCC |
| | | CCCCCGCTTACAACTCTACACATCTGTGACCACTTTTAATAA |
| | | TATCAAGTTTGCATAGTCATGGAACACA |
| | | AATCAAACAAGTACTGTAGTATTACAGTGACAGGAATCTTA |
| | | AAATACCATCTGGTGCTGAATATATGATG |
| | | TACTGAAATACTGGAATTATGGCTTTTTGAAATGCAGTTTTT |
| | | ACTGTAATCTTAACTTTTATTTATCAAA |
| | | ATAGCTACAGGAAACATGAATAGCAGGAAAACACTGAATT |
| | | TGTTTGGATGTTCTAAGAAATGGTGCTAAG |
| | | AAAATGGTGTCTTTAATAGCTAAAAATTTAATGCCTTTATAT |
| | | CATCAAGATGCTATCAGTGTACTCCAGT |
| | | GCCCTTGAATAATAGGGGTACCTTTTCATTCAAGTTTTTATC |
| | | ATAATTACCTATTCTTACACAAGCTTAG |
| | | TTTTTAAAATGTGGACATTTTAAAGGCCTCTGGATTTTGCTC |
| | | ATCCAGTGAAGTCCTTGTAGGACAATAA |
| | | ACGTATATATGTACATATATACACAAACATGTATATGTGCA |
| | | CACACATGTATATGTATAAATATTTTAAA |
| | | TGGTGTTTTAGAAGCACTTTGTCTACCTAAGCTTTGACAACT |
| | | TGAACAATGCTAAGGTACTGAGATGTTT |
| | | AAAAAACAAGTTTACTTTCATTTTAGAATGCAAAGTTGATT |
| | | TTTTTAAGGAAACAAAGAAAGCTTTTAAA |
| | | ATATTTTTGCTTTTAGCCATGCATCTGCTGATGAGCAATTGT |
| | | GTCCATTTTTAACACAGCCAGTTAAATC |
| | | CACCATGGGGCTTACTGGATTCAAGGGAATACGTTAGTCCA |
| | | CAAAACATGTTTTCTGGTGCTCATCTCAC |
| | | ATGCTATACTGTAAAACAGTTTTATACAAAATTGTATGACA |
| | | AGTTCATTGCTCAAAAATGTACAGTTTTA |
| | | AGAATTTTCTATTAACTGCAGGTAATAATTAGCTGCATGCT |
| | | GCAGACTCAACAAAGCTAGTTCACTGAAG |
| | | CCTATGCTATTTTATGGATCATAGGCTCTTCAGAGAACTGA |
| | | ATGGCAGTCTGCCTTTGTGTTGATAATTA |
| | | TGTACATTGTGACGTTGTCATTTCTTAGCTTAAGTGTCCTCT |
| | | TTAACAAGAGGATTGAGCAGACTGATGC |
| | | CTGCATAAGATGAATAAACAGGGTTAGTTCCATGTGAATCT |
| | | GTCAGTTAAAAAGAAACAAAAACAGGCAG |
| | | CTGGTTTGCTGTGGTGGTTTTAAATCATTAATTTGTATAAAG |
| | | AAGTGAAAGAGTTGTATAGTAAATTAAA |
| | | TTGTAAACAAAACTTTTTTAATGCAATGCTTTAGTATTTTAG |
| | | TACTGTAAAAAAATTAAATATATACATA |
| | | TATATATATATATATATATATATATATATGAGTTTGAAGCAG |
| | | AATTCACATCATGATGGTGCTACTCAGC |
| | | CTGCTACAAATATATCATAATGTGAGCTAAGAATTCATTAA |
| | | ATGTTTGAGTGATGTTCCTACTTGTCATA |
| | | TACCTCAACACTAGTTTGGCAATAGGATATTGAACTGAGAG |
| | | TGAAAGCATTGTGTACCATCATTTTTTTC |
| | | CAAGTCCTTTTTTTTATTGTTAAAAAAAAAAGCATACCTTTT |
| | | TTCAATACTTGATTTCTTAGCAAGTATA |
| | | ACTTGAACTTCAACCTTTTTGTTCTAAAAATTCAGGGATATT |
| | | TCAGCTCATGCTCTCCCTATGCCAACAT |
| | | GTCACCTGTGTTTATGTAAAATTGTTGTAGGTTAATAAATAT |
| | | ATTCTTTGTCAGGGATTTAACCCTTTTA |
| | | TTTTGAATCCCTTCTATTTTACTTGTACATGTGCTGATGTAA |
| | | CTAAAACTAATTTTGTAAATCTGTTGGC |
| | | TCTTTTTATTGTAAAGAAAAGCATTTTAAAAGTTTGAGGAA |
| | | TCTTTTGACTGTTTCAAGCAGGAAAAAAA |
| | | AATTACATGAAAATAGAATGCACTGAGTTGATAAAGGGAA |
| | | AAATTGTAAGGCAGGAGTTTGGCAAGTGGC |
| | | TGTTGGCCAGAGACTTACTTGTAACTCTCTAAATGAAGTTTT |
| | | TTTGATCCTGTAATCACTGAAGGTACAT |
| | | ACTCCATGTGGACTTCCCTTAAACAGGCAAACACCTACAGG |
| | | TATGGTGTGCAACAGATTGTACAATTACA |
| | | TTTTGGCCTAAATACATTTTTGCTTACTAGTATTTAAAATAA |
| | | ATTCTTAATCAGAGGAGGCCTTTGGGTT |
| | | TTATTGGTCAAATCTTTGTAAGCTGGCTTTTGTCTTTTTAAA |
| | | AAATTTCTTGAATTTGTGGTTGTGTCCA |
| | | ATTTGCAAACATTTCCAAAAATGTTTGCTTTGCTTACAAACC |
| | | ACATGATTTTAATGTTTTTTGTATACCA |
| | | TAATATCTAGCCCCAAACATTTGATTACTACATGTGCATTGG |
| | | TGATTTTGATCATCCATTCTTAATATTT |
| | | GATTTCTGTGTCACCTACTGTCATTTGTTAAACTGCTGGCCA |
| | | ACAAGAACAGGAAGTATAGTTTGGGGGG |
| | | TTGGGGAGAGTTTACATAAGGAAGAGAAGAAATTGAGTGG |
| | | CATATTGTAAATATCAGATCTATAATTGTA |
| | | AATATAAAACCTGCCTCAGTTAGAATGAATGGAAAGCAGAT |
| | | CTACAATTTGCTAATATAGGAATATCAGG |
| | | TTGACTATATAGCCATACTTGAAAATGCTTCTGAGTGGTGTC |
| | | AACTTTACTTGAATGAATTTTTCATCTT |
| | | GATTGACGCACAGTGATGTACAGTTCACTTCTGAAGCTAGT |
| | | GGTTAACTTGTGTAGGAAACTTTTGCAGT |
| | | TTGACACTAAGATAACTTCTGTGTGCATTTTTCTATGCTTTT |
| | | TTAAAAACTAGTTTCATTTCATTTTCAT |
| | | GAGATGTTTGGTTTATAAGATCTGAGGATGGTTATAAATAC |
| | | TGTAAGTATTGTAATGTTATGAATGCAGG |
| | | TTATTTGAAAGCTGTTTATTATTATATCATTCCTGATAATGC |
| | | TATGTGAGTGTTTTTAATAAAATTTATA |
| | | TTTATTTAATGCACTCTAA |
| PPREDICTED: | XXM_011532043.1 | GTAGAGAAGCAGAAGGAAGCAAGATGGCTGCCCTTTAGGA |
| Homo sapiens | | TTTGTTAGAAAGGAGACCCGACTGCAACTG |
| tet | | CTGGATTGCTGCAAGGCTGAGGGACGAGAACGAGGCTGGC |
| methylcytosine | | AAACATTCAGCAGCACACCCTCTCAAGATT |
| dioxygenase 2 | | GTTTACTTGCCTTTGCTCCTGTTGAGTTACAACGCTTGGAAG |
| (TET2), | | CAGGAGATGGGCTCAGCAGCAGCCAATA |
| transcript | | GGACATGATCCAGGAAGAGCAGTAAGGGACTGAGCTGCTG |
| variant X7, | | AATTCAACTAGAGGGCAGCCTTGTGGATGG |
| mRNA | | CCCCGAAGCAAGCCTGATGGAACAGGATAGAACCAACCAT |
| [SEQ ID NO: | | GTTGAGGGCAACAGACTAAGTCCATTCCTG |
| 1363] | | ATACCATCACCTCCCATTTGCCAGACAGAACCTCTGGCTAC |
| | | AAAGCTCCAGAATGGAAGCCCACTGCCTG |
| | | AGAGAGCTCATCCAGAAGTAAATGGAGACACCAAGTGGCA |
| | | CTCTTTCAAAAGTTATTATGGAATACCCTG |
| | | TATGAAGGGAAGCCAGAATAGTCGTGTGAGTCCTGACTTTA |
| | | CACAAGAAAGTAGAGGGTATTCCAAGTGT |
| | | TTGCAAAATGGAGGAATAAAACGCACAGTTAGTGAACCTTC |
| | | TCTCTCTGGGCTCCTTCAGATCAAGAAAT |
| | | TGAAACAAGACCAAAAGGCTAATGGAGAAAGACGTAACTT |
| | | CGGGGTAAGCCAAGAAAGAAATCCAGGTGA |
| | | AAGCAGTCAACCAAATGTCTCCGATTTGAGTGATAAGAAAG |
| | | AATCTGTGAGTTCTGTAGCCCAAGAAAAT |
| | | GCAGTTAAAGATTTCACCAGTTTTTCAACACATAACTGCAG |
| | | TGGGCCTGAAAATCCAGAGCTTCAGATTC |
| | | TGAATGAGCAGGAGGGGAAAAGTGCTAATTACCATGACAA |
| | | GAACATTGTATTACTTAAAAACAAGGCAGT |
| | | GCTAATGCCTAATGGTGCTACAGTTTCTGCCTCTTCCGTGGA |
| | | ACACACACATGGTGAACTCCTGGAAAAA |
| | | ACACTGTCTCAATATTATCCAGATTGTGTTTCCATTGCGGTG |
| | | CAGAAAACCACATCTCACATAAATGCCA |
| | | TTAACAGTCAGGCTACTAATGAGTTGTCCTGTGAGATCACT |
| | | CACCCATCGCATACCTCAGGGCAGATCAA |
| | | TTCCGCACAGACCTCTAACTCTGAGCTGCCTCCAAAGCCAG |
| | | CTGCAGTGGTGAGTGAGGCCTGTGATGCT |
| | | GATGATGCTGATAATGCCAGTAAACTAGCTGCAATGCTAAA |
| | | TACCTGTTCCTTTCAGAAACCAGAACAAC |
| | | TACAACAACAAAAATCAGTTTTTGAGATATGCCCATCTCCT |
| | | GCAGAAAATAACATCCAGGGAACCACAAA |
| | | GCTAGCGTCTGGTGAAGAATTCTGTTCAGGTTCCAGCAGCA |
| | | ATTTGCAAGCTCCTGGTGGCAGCTCTGAA |
| | | CGGTATTTAAAACAAAATGAAATGAATGGTGCTTACTTCAA |
| | | GCAAAGCTCAGTGTTCACTAAGGATTCCT |
| | | TTTCTGCCACTACCACACCACCACCACCATCACAATTGCTTC |
| | | TTTCTCCCCCTCCTCCTCTTCCACAGGT |
| | | TCCTCAGCTTCCTTCAGAAGGAAAAAGCACTCTGAATGGTG |
| | | GAGTTTTAGAAGAACACCACCACTACCCC |
| | | AACCAAAGTAACACAACACTTTTAAGGGAAGTGAAAATAG |
| | | AGGGTAAACCTGAGGCACCACCTTCCCAGA |
| | | GTCCTAATCCATCTACACATGTATGCAGCCCTTCTCCGATGC |
| | | TTTCTGAAAGGCCTCAGAATAATTGTGT |
| | | GAACAGGAATGACATACAGACTGCAGGGACAATGACTGTT |
| | | CCATTGTGTTCTGAGAAAACAAGACCAATG |
| | | TCAGAACACCTCAAGCATAACCCACCAATTTTTGGTAGCAG |
| | | TGGAGAGCTACAGGACAACTGCCAGCAGT |
| | | TGATGAGAAACAAAGAGCAAGAGATTCTGAAGGGTCGAGA |
| | | CAAGGAGCAAACACGAGATCTTGTGCCCCC |
| | | AACACAGCACTATCTGAAACCAGGATGGATTGAATTGAAG |
| | | GCCCCTCGTTTTCACCAAGCGGAATCCCAT |
| | | CTAAAACGTAATGAGGCATCACTGCCATCAATTCTTCAGTA |
| | | TCAACCCAATCTCTCCAATCAAATGACCT |
| | | CCAAACAATACACTGGAAATTCCAACATGCCTGGGGGGCTC |
| | | CCAAGGCAAGCTTACACCCAGAAAACAAC |
| | | ACAGCTGGAGCACAAGTCACAAATGTACCAAGTTGAAATG |
| | | AATCAAGGGCAGTCCCAAGGTACAGTGGAC |
| | | CAACATCTCCAGTTCCAAAAACCCTCACACCAGGTGCACTT |
| | | CTCCAAAACAGACCATTTACCAAAAGCTC |
| | | ATGTGCAGTCACTGTGTGGCACTAGATTTCATTTTCAACAA |
| | | AGAGCAGATTCCCAAACTGAAAAACTTAT |
| | | GTCCCCAGTGTTGAAACAGCACTTGAATCAACAGGCTTCAG |
| | | AGACTGAGCCATTTTCAAACTCACACCTT |
| | | TTGCAACATAAGCCTCATAAACAGGCAGCACAAACACAAC |
| | | CATCCCAGAGTTCACATCTCCCTCAAAACC |
| | | AGCAACAGCAGCAAAAATTACAAATAAAGAATAAAGAGGA |
| | | AATACTCCAGACTTTTCCTCACCCCCAAAG |
| | | CAACAATGATCAGCAAAGAGAAGGATCATTCTTTGGCCAGA |
| | | CTAAAGTGGAAGAATGTTTTCATGGTGAA |
| | | AATCAGTATTCAAAATCAAGCGAGTTCGAGACTCATAATGT |
| | | CCAAATGGGACTGGAGGAAGTACAGAATA |
| | | TAAATCGTAGAAATTCCCCTTATAGTCAGACCATGAAATCA |
| | | AGTGCATGCAAAATACAGGTTTCTTGTTC |
| | | AAACAATACACACCTAGTTTCAGAGAATAAAGAACAGACT |
| | | ACACATCCTGAACTTTTTGCAGGAAACAAG |
| | | ACCCAAAACTTGCATCACATGCAATATTTTCCAAATAATGT |
| | | GATCCCAAAGCAAGATCTTCTTCACAGGT |
| | | GCTTTCAAGAACAGGAGCAGAAGTCACAACAAGCTTCAGTT |
| | | CTACAGGGATATAAAAATAGAAACCAAGA |
| | | TATGTCTGGTCAACAAGCTGCGCAACTTGCTCAGCAAAGGT |
| | | ACTTGATACATAACCATGCAAATGTTTTT |
| | | CCTGTGCCTGACCAGGGAGGAAGTCACACTCAGACCCCTCC |
| | | CCAGAAGGACACTCAAAAGCATGCTGCTC |
| | | TAAGGTGGCATCTCTTACAGAAGCAAGAACAGCAGCAAAC |
| | | ACAGCAACCCCAAACTGAGTCTTGCCATAG |
| | | TCAGATGCACAGGCCAATTAAGGTGGAACCTGGATGCAAG |
| | | CCACATGCCTGTATGCACACAGCACCACCA |
| | | GAAAACAAAACATGGAAAAAGGTAACTAAGCAAGAGAATC |
| | | CACCTGCAAGCTGTGATAATGTGCAGCAAA |
| | | AGAGCATCATTGAGACCATGGAGCAGCATCTGAAGCAGTTT |
| | | CACGCCAAGTCGTTATTTGACCATAAGGC |
| | | TCTTACTCTCAAATCACAGAAGCAAGTAAAAGTTGAAATGT |
| | | CAGGGCCAGTCACAGTTTTGACTAGACAA |
| | | ACCACTGCTGCAGAACTTGATAGCCACACCCCAGCTTTAGA |
| | | GCAGCAAACAACTTCTTCAGAAAAGACAC |
| | | CAACCAAAAGAACAGCTGCTTCTGTTCTCAATAATTTTATA |
| | | GAGTCACCTTCCAAATTACTAGATACTCC |
| | | TATAAAAAATTTATTGGATACACCTGTCAAGACTCAATATG |
| | | ATTTCCCATCTTGCAGATGTGTAGAGCAA |
| | | ATTATTGAAAAAGATGAAGGTCCTTTTTATACCCATCTAGG |
| | | AGCAGGTCCTAATGTGGCAGCTATTAGAG |
| | | AAATCATGGAAGAAAGGTATACAAGTACTTGCCTTTACTCC |
| | | TGCATGTAGAAGACTCTTATGAGCGAGAT |
| | | AATGCAGAGAAGGCCTTTCATATAAATTTATACAGCTCTGA |
| | | GCTGTTCTTCTTCTAGGGTGCCTTTTCAT |
| | | TAAGAGGTAGGCAGTATTATTATTAAAGTACTTAGGATACA |
| | | TTGGGGCAGCTAGGACATATTCAGTATCA |
| | | TTCTTGCTCCATTTCCAAATTATTCATTTCTAAATTAGCATG |
| | | TAGAAGTTCACTAAATAATCATCTAGTG |
| | | GCCTGGCAGAAATAGTGAATTTCCCTAAGTGCCTTTTTTTTG |
| | | TTGTTTTTTTGTTTTGTTTTTTAAACAA |
| | | GCAGTAGGTGGTGCTTTGGTCATAAGGGAAGATATAGTCTA |
| | | TTTCTAGGACTATTCCATATTTTCCATGT |
| | | GGCTGGATACTAACTATTTGCCAGCCTCCTTTTCTAAATTGT |
| | | GAGACATTCTTGGAGGAACAGTTCTAAC |
| | | TAAAATCTATTATGACTCCCCAAGTTTTAAAATAGCTAAATT |
| | | TAGTAAGGGAAAAAATAGTTTATGTTTT |
| | | AGAAGACTGAACTTAGCAAACTAACCTGAATTTTGTGCTTT |
| | | GTGAAATTTTATATCGAAATGAGCTTTCC |
| | | CATTTTCACCCACATGTAATTTACAAAATAGTTCATTACAAT |
| | | TATCTGTACATTTTGATATTGAGGAAAA |
| | | ACAAGGCTTAAAAACCATTATCCAGTTTGCTTGGCGTAGAC |
| | | CTGTTTAAAAAATAATAAACCGTTCATTT |
| | | CTCAGGATGTGGTCATAGAATAAAGTTATGCTCAAATGTTC |
| | | AAA |

[0166] “Tet inhibitor” or “Tet[x] inhibitor” (e.g., “Tet1 inhibitor,” “Tet2 inhibitor”, or “Tet3 inhibitor”) as the terms are used herein, refers to a molecule, or group of molecules (e.g., a system) that reduces or eliminates the function and/or expression of the corresponding Tet, e.g., Tet1, Tet2 and/or Tet3, e.g., Tet2. In embodiments, a Tet, e.g., Tet1, Tet2 and/or Tet3, e.g., Tet2 inhibitor is a molecule that inhibits the expression of Tet, e.g., Tet1, Tet2 and/or Tet3, e.g., Tet2, e.g., reduces or eliminates expression of Tet, e.g., Tet1, Tet2 and/or Tet3, e.g., Tet2. In embodiments, the Tet, e.g., Tet1, Tet2 and/or Tet3, e.g., Tet2 inhibitor is a molecule that inhibits the function of Tet, e.g., Tet1, Tet2 and/or Tet3, e.g., Tet2. An example of Tet, e.g., Tet1, Tet2 and/or Tet3, e.g., Tet2 inhibitor that inhibits the expression of Tet, e.g., Tet1, Tet2 and/or Tet3, e.g., Tet2 is a gene editing system, e.g., as described herein, that is targeted to nucleic acid within the Tet, e.g., Tet1, Tet2 and/or Tet3, e.g., Tet2 gene, or its regulatory elements, such that modification of the nucleic acid at or near the gene editing system binding site(s) is modified to reduce or eliminate expression of Tet, e.g., Tet1, Tet2 and/or Tet3, e.g., Tet2. Another example of a Tet, e.g., Tet1, Tet2 and/or Tet3, e.g., Tet2 inhibitor that inhibits the expression of Tet, e.g., Tet1, Tet2 and/or Tet3, e.g., Tet2 is a nucleic acid molecule, e.g., RNA molecule, e.g., a short hairpin RNA (shRNA) or short interfering RNA (siRNA), capable of hybridizing with Tet, e.g., Tet1, Tet2 and/or Tet3, e.g., Tet2 mRNA and causing a reduction or elimination of Tet, e.g., Tet1, Tet2 and/or Tet3, e.g., Tet2 translation. Tet, e.g., Tet1, Tet2 and/or Tet3, e.g., Tet2 inhibitors also include nucleic acids encoding molecules which inhibit Tet, e.g., Tet1, Tet2 and/or Tet3, e.g., Tet2 expression (e.g., nucleic acid encoding an anti-Tet, e.g., Tet1, Tet2 and/or Tet3, e.g., Tet2 shRNA or siRNA, or nucleic acid encoding one or more, e.g., all, components of an anti-Tet, e.g., Tet1, Tet2 and/or Tet3, e.g., Tet2 gene editing system). An example of a molecule that inhibits the function of Tet, e.g., Tet1, Tet2 and/or Tet3, e.g., Tet2 is a molecule, e.g., a protein or small molecule which inhibits one or more activities of Tet, e.g., Tet1, Tet2 and/or Tet3, e.g., Tet2. An example is a small molecule inhibitor of Tet, e.g., Tet1, Tet2 and/or Tet3, e.g., Tet2. Another example is a dominant negative Tet, e.g., Tet1, Tet2 and/or Tet3, e.g., Tet2 protein. Another example is a dominant negative version of a Tet, e.g., Tet1, Tet2 and/or Tet3, e.g., Tet2 binding partner, e.g., an associated histone deacetylase (HDAC). Another example is a molecule, e.g., a small molecule, which inhibits a Tet, e.g., Tet1, Tet2 and/or Tet3, e.g., Tet2 binding partner, e.g., a Tet, e.g., Tet1, Tet2 and/or Tet3, e.g., Tet2-associated HDAC inhibitor. Tet, e.g., Tet1, Tet2 and/or Tet3, e.g., Tet2 inhibitors also include nucleic acids encoding inhibitors of Tet, e.g., Tet1, Tet2 and/or Tet3, e.g., Tet2 function.

[0167] A “system” as the term is used herein in connection with gene editing or Tet, e.g., Tet1, Tet2 and/or Tet3, e.g., Tet2 inhibition, refers to a group of molecules, e.g., one or more molecules, which together act to effect a desired function.

[0168] A “gene editing system” as the term is used herein, refers to a system, e.g., one or more molecules, that direct and effect an alteration, e.g., a deletion, of one or more nucleic acids at or near a site of genomic DNA targeted by said system. Gene editing systems are known in the art, and are described more fully below.

[0169] “binding partner” as the term is used herein in the context of a Tet, e.g., Tet1, Tet2 and/or Tet3, e.g., Tet2 binding partner, refers to a molecule, e.g., a protein, which interacts, e.g., binds to, Tet, e.g., Tet1, Tet2 and/or Tet3, e.g., Tet2 protein. Without being bound by theory, it is believed that Tet, e.g., Tet1, Tet2 and/or Tet3, e.g., Tet2 binds to one or more HDAC proteins. Such HDAC proteins are considered examples of Tet, e.g., Tet1, Tet2 and/or Tet3, e.g., Tet2 binding partners.

[0170] A “dominant negative” gene product or protein is one that interferes with the function of another gene product or protein. The other gene product affected can be the same or different from the dominant negative protein. Dominant negative gene products can be of many forms, including truncations, full length proteins with point mutations or fragments thereof, or fusions of full length wild type or mutant proteins or fragments thereof with other proteins. The level of inhibition observed can be very low. For example, it may require a large excess of the dominant negative protein compared to the functional protein or proteins involved in a process in order to see an effect. It may be difficult to see effects under normal biological assay conditions. In one embodiment, a dominant negative Tet, e.g., Tet1, Tet2 and/or Tet3, e.g., Tet2 is a catalytically inactive Tet, e.g., Tet1, Tet2 and/or Tet3, e.g., Tet2. In another embodiment, a dominant negative Tet, e.g., Tet1, Tet2 and/or Tet3, e.g., Tet2 binding partner is a catalytically inactive Tet, e.g., Tet1, Tet2 and/or Tet3, e.g., Tet2-binding HDAC inhibitor.

### Description

[0171] The present invention provides Tet, e.g., Tet1, Tet2 and/or Tet3, e.g., Tet2, inhibitors and methods of use therefore. In particular, the invention provides CAR-expressing T cells comprising Tet, e.g., Tet1, Tet2 and/or Tet3, e.g., Tet2, inhibitors, and use of Tet, e.g., Tet1, Tet2 and/or Tet3, e.g., Tet2, in connection with CAR T cells. Tet, e.g., Tet1, Tet2 and/or Tet3, e.g., Tet2, inhibitor of the present invention, together with their methods of use, are described in more detail below. CARs, CAR T cells, and methods of use are further described below.

Tet, e.g., Tet1, Tet2 and/or Tet3, e.g., Tet2 Inhibitors

[0172] The present invention provides compositions, e.g., Tet, e.g., Tet1, Tet2 and/or Tet3, e.g., Tet2 inhibitors, and methods for enhancing immune effector cell functions, e.g., CAR-expressing cell functions, by using such compositions and/or other means as described herein. Any Tet, e.g., Tet1, Tet2 and/or Tet3, e.g., Tet2, inhibitors known in the art can be used as a Tet, e.g., Tet1, Tet2 and/or Tet3, e.g., Tet2, inhibitor according to the present invention. Examples of Tet, e.g., Tet1, Tet2 and/or Tet3, e.g., Tet2, inhibitors are described below.

### Gene Editing Systems

[0173] According to the present invention, gene editing systems can be used as Tet, e.g., Tet1, Tet2 and/or Tet3, e.g., Tet2, inhibitors. Also contemplated by the present invention are the uses of nucleic acid encoding one or more components of a Tet, e.g., Tet1, Tet2 and/or Tet3, e.g., Tet2, gene editing system.

[0174] CRISPR/Cas9 Gene Editing Systems

[0175] Naturally-occurring CRISPR/Cas systems are found in approximately 40% of sequenced eubacteria genomes and 90% of sequenced archaea. Grissa et al. (2007) BMC Bioinformatics 8: 172. This system is a type of prokaryotic immune system that confers resistance to foreign genetic elements such as plasmids and phages and provides a form of acquired immunity. Barrangou et al. (2007) Science 315: 1709-1712; Marragini et al. (2008) Science 322: 1843-1845.

[0176] The CRISPR/Cas system has been modified for use in gene editing (silencing, enhancing or changing specific genes) in eukaryotes such as mice or primates. Wiedenheft et al. (2012) Nature 482: 331-8. This is accomplished by, for example, introducing into the eukaryotic cell a plasmid containing a specifically designed CRISPR and one or more appropriate Cas.

[0177] The CRISPR sequence, sometimes called a CRISPR locus, comprises alternating repeats and spacers. In a naturally-occurring CRISPR, the spacers usually comprise sequences foreign to the bacterium such as a plasmid or phage sequence; in an exemplary Tet, e.g., Tet1, Tet2 and/or Tet3, e.g., Tet2, CRISPR/Cas system, the spacers are derived from the Tet, e.g., Tet1, Tet2 and/or Tet3, e.g., Tet2, gene sequence, or a sequence of its regulatory elements.

[0178] RNA from the CRISPR locus is constitutively expressed and processed into small RNAs. These comprise a spacer flanked by a repeat sequence. The RNAs guide other Cas proteins to silence exogenous genetic elements at the RNA or DNA level. Horvath et al. (2010) Science 327: 167-170; Makarova et al. (2006) Biology Direct 1: 7. The spacers thus serve as templates for RNA molecules, analogously to siRNAs. Pennisi (2013) Science 341: 833-836.

[0179] As these naturally occur in many different types of bacteria, the exact arrangements of the CRISPR and structure, function and number of Cas genes and their product differ somewhat from species to species. Haft et al. (2005) PLoS Comput. Biol. 1: e60; Kunin et al. (2007) Genome Biol. 8: R61; Mojica et al. (2005) J. Mol. Evol. 60: 174-182; Bolotin et al. (2005) Microbiol. 151: 2551-2561; Pourcel et al. (2005) Microbiol. 151: 653-663; and Stern et al. (2010) Trends. Genet. 28: 335-340. For example, the Cse (Cas subtype, E. coli) proteins (e.g., CasA) form a functional complex, Cascade, that processes CRISPR RNA transcripts into spacer-repeat units that Cascade retains. Brouns et al. (2008) Science 321: 960-964. In other prokaryotes, Cas6 processes the CRISPR transcript. The CRISPR-based phage inactivation in E. coli requires Cascade and Cas3, but not Cas1 or Cas2. The Cmr (Cas RAMP module) proteins in Pyrococcus furiosus and other prokaryotes form a functional complex with small CRISPR RNAs that recognizes and cleaves complementary target RNAs. A simpler CRISPR system relies on the protein Cas9, which is a nuclease with two active cutting sites, one for each strand of the double helix. Combining Cas9 and modified CRISPR locus RNA can be used in a system for gene editing. Pennisi (2013) Science 341: 833-836.

[0180] The CRISPR/Cas system can thus be used to modify, e.g., delete one or more nucleic acids, the Tet, e.g., Tet1, Tet2 and/or Tet3, e.g., Tet2, gene, or a Tet, e.g., Tet1, Tet2 and/or Tet3, e.g., Tet2, gene regulatory element, or introduce a premature stop which thus decreases expression of a functional Tet, e.g., Tet1, Tet2 and/or Tet3, e.g., Tet2. The CRISPR/Cas system can alternatively be used like RNA interference, turning off the Tet, e.g., Tet1, Tet2 and/or Tet3, e.g., Tet2, gene in a reversible fashion. In a mammalian cell, for example, the RNA can guide the Cas protein to a Tet, e.g., Tet1, Tet2 and/or Tet3, e.g., Tet2, promoter, sterically blocking RNA polymerases.

[0181] CRISPR/Cas systems for gene editing in eukaryotic cells typically involve (1) a guide RNA molecule (gRNA) comprising a targeting sequence (which is capable of hybridizing to the genomic DNA target sequence), and sequence which is capable of binding to a Cas, e.g., Cas9 enzyme, and (2) a Cas, e.g., Cas9, protein. The targeting sequence and the sequence which is capable of binding to a Cas, e.g., Cas9 enzyme, may be disposed on the same or different molecules. If disposed on different molecules, each includes a hybridization domain which allows the molecules to associate, e.g., through hybridization.

[0182] An exemplary gRNA molecule of the present invention comprises, e.g., consists of a first nucleic acid having the sequence (where the “n” 's refer to the residues of the targeting sequence (e.g., as described herein, e.g., in Table 3), and may consist of 15-25 nucelotides, e.g., consist of 20 nucleotides):

(SEQ ID NO: 40)
nnnnnnnnnnnnnnnnnnnnGUUUUAGAGCUAUGCUGUUUUG;

[0183] and a second nucleic acid sequence having the sequence:

(SEQ ID NO: 41)
AACUUACCAAGGAACAGCAUAGCAAGUUAAAAUAAGGCUAGUCCGUUAUC
AACUUGAAAAAGUGGCACCGAGUCGGUGC,
optionally with 1, 2, 3, 4, 5, 6, or 7 (e.g., 4
or 7, e.g., 7) additional U nucleotides at the 3′
end.

[0184] The second nucleic acid molecule may alternatively consist of a fragment of the sequence above, wherein such fragment is capable of hybridizing to the first nucleic acid. An example of such second nucleic acid molecule is:

(SEQ ID NO: 42)
AACAGCAUAGCAAGUUAAAAUAAGGCUAGUCCGUUAUCAACUUGAAAAAG
UGGCACCGAGUCGGUGC,
optionally with 1, 2, 3, 4, 5, 6, or 7 (e.g., 4
or 7, e.g., 7) additional U nucleotides at the 3′
end.

[0185] Another exemplary gRNA molecule of the present invention comprises, e.g., consists of a first nucleic acid having the sequence (where the “n” 's refer to the residues of the targeting sequence (e.g., as described herein, e.g., in Table 3), and may consist of 15-25 nucelotides, e.g., consist of 20 nucleotides):

(SEQ ID NO: 43)
nnnnnnnnnnnnnnnnnnnGUUUUAGAGCUAGAAAUAGCAAGUUAAAAUA
AGGCUAGUCCGUUAUCAACUUGAAAAAGUGGCACCGAGUCGGUGC,

optionally with 1, 2, 3, 4, 5, 6, or 7 (e.g., 4 or 7, e.g., 4) additional U nucleotides at the 3′ end. Artificial CRISPR/Cas systems can be generated which inhibit Tet, e.g., Tet1, Tet2 and/or Tet3, e.g., Tet2, using technology known in the art, e.g., that are described in U.S. Publication No. 20140068797, WO2015/048577, and Cong (2013) Science 339: 819-823. Other artificial CRISPR/Cas systems that are known in the art may also be generated which inhibit Tet, e.g., Tet1, Tet2 and/or Tet3, e.g., Tet2, e.g., that described in Tsai (2014) Nature Biotechnol., 32:6 569-576, U.S. Pat. Nos. 8,871,445; 8,865,406; 8,795,965; 8,771,945; and 8,697,359, the contents of which are hereby incorporated by reference in their entirety. Such systems can be generated which inhibit Tet, e.g., Tet1, Tet2 and/or Tet3, e.g., Tet2, by, for example, engineering a CRISPR/Cas system to include a gRNA molecule comprising a targeting sequence that hybridizes to a sequence of a tet gene, e.g., a Tet1, Tet2 and/or Tet3, e.g., Tet2 gene. In embodiments, the gRNA comprises a targeting sequence which is fully complementarity to 15-25 nucleotides, e.g., 20 nucleotides, of a tet gene, e.g., a Tet1, Tet2 and/or Tet3, e.g., Tet2 gene. In embodiments, the 15-25 nucleotides, e.g., 20 nucleotides, of a tet gene, e.g., a Tet1, Tet2 and/or Tet3, e.g., Tet2 gene, are disposed immediately 5′ to a protospacer adjacent motif (PAM) sequence recognized by the Cas protein of the CRISPR/Cas system (e.g., where the system comprises a S. pyogenes Cas9 protein, the PAM sequence comprises NGG, where N can be any of A, T, G or C). In embodiments, the targeting sequence of the gRNA comprises, e.g., consists of, a RNA sequence complementary to a sequence listed in Table 2. In embodiments, the gRNA comprises a targeting sequence listed in Table 3.

[0186] In one embodiment, foreign DNA can be introduced into the cell along with the CRISPR/Cas system, e.g., DNA encoding a CAR, e.g., as described herein; depending on the sequences of the foreign DNA and chromosomal sequence, this process can be used to integrate the DNA encoding the CAR, e.g., as described herein, at or near the site targeted by the CRISPR/Cas system. As shown herein, in the examples, but without being bound by theory, such integration may lead to the expression of the CAR as well as disruption of the Tet, e.g., Tet1, Tet2 and/or Tet3, e.g., Tet2, gene. Such foreign DNA molecule is referred to herein as “template DNA.” In embodiments, the template DNA further comprises homology arms 5′ to, 3′ to, or both 5′ and 3′ to the nucleic acid of the template DNA which encodes the molecule or molecules of interest (e.g., which encodes a CAR described herein), wherein said homology arms are complementary to genomic DNA sequence flanking the target sequence.

[0187] In an embodiment, the CRISPR/Cas system of the present invention comprises Cas9, e.g., S. pyogenes Cas9, and a gRNA comprising a targeting sequence which hybridizes to a sequence of the Tet, e.g., Tet1, Tet2 and/or Tet3, e.g., Tet2, gene. In an embodiment, the CRISPR/Cas system comprises nucleic acid encoding a Tet, e.g., Tet1, Tet2 and/or Tet3, e.g., Tet2, gRNA and nucleic acid encoding a Cas protein, e.g., Cas9, e.g., S. pyogenes Cas9. In an embodiment, the CRISPR/Cas system comprises a Tet, e.g., Tet1, Tet2 and/or Tet3, e.g., Tet2, gRNA and nucleic acid encoding a Cas protein, e.g., Cas9, e.g., S. pyogenes Cas9.

[0188] Examples of genomic target sequences for Tet2, for which gRNAs comprising complementary targeting sequences can be generated for use in the present invention are listed in the table 2 below. In embodiments, the gRNA comprises an RNA complement of a Target Sequence of the table below (e.g., for sgTET2_1, the gRNA would comprise CCUUGGACACCUUCUCCUCC (SEQ ID NO: 44)). In embodiments, the gRNA comprises the RNA analog of a Target sequence of the table 2 below (e.g., for sgTET2_1, the gRNA would comprise GGAACCUGUGGAAGAGGAGG (SEQ ID NO: 45). In embodiments, the Tet2 inhibitor is nucleic acid encoding a gRNA molecule specific for Tet2, wherein the nucleic acid comprises the sequence of a Target Sequence from the 2 table below, e.g., under the control of a U6- or H1-promoter:

TABLE 2

| | Gene | | | | Target Sequence within |
|---|---|---|---|---|---|
| gRNA ID | Symbol | Chromosome | Position | Strand | the Tet2 gene sequence |
| sgTET2_1 | TET2 | chr4 | 106156327 | − | GGAACCTGTGGAAGAGGAGG |
| | | | | | (SEQ ID NO: 46) |
| sgTET2_2 | TET2 | chr4 | 106156339 | − | GAAGGAAGCTGAGGAACCTG |
| | | | | | (SEQ ID NO: 47) |
| sgTET2_3 | TET2 | chr4 | 106156897 | + | ATGACCTCCAAACAATACAC |
| | | | | | (SEQ ID NO: 48) |
| sgTET2_4 | TET2 | chr4 | 106157189 | − | CAAGTGCTGTTTCAACACTG |
| | | | | | (SEQ ID NO: 49) |
| sgTET2_5 | TET2 | chr4 | 106157296 | − | GGGAGATGTGAACTCTGGGA |
| | | | | | (SEQ ID NO: 50) |
| sgTET2_6 | TET2 | chr4 | 106155148 | − | GGAGGTGATGGTATCAGGAA |
| | | | | | (SEQ ID NO: 51) |
| sgTET2_7 | TET2 | chr4 | 106155166 | − | GGTTCTGTCTGGCAAATGGG |
| | | | | | (SEQ ID NO: 52) |
| sgTET2_8 | TET2 | chr4 | 106155217 | − | GGATGAGCTCTCTCAGGCAG |
| | | | | | (SEQ ID NO: 53) |
| sgTET2_9 | TET2 | chr4 | 106155403 | − | TGAAGGAGCCCAGAGAGAGA |
| | | | | | (SEQ ID NO: 65) |
| sgTET2_10 | TET2 | chr4 | 106155478 | + | GTAAGCCAAGAAAGAAATCC |
| | | | | | (SEQ ID NO: 66) |

[0189] Examples of gRNA targeting sequences which are useful in the various embodiments of the present invention to inhibit a Tet, e.g., Tet2, are provided below in Table 3. In embodiments a CRISPR/Cas system of the present invention comprises a gRNA molecule comprising a targeting sequence comprising a sequence listed in Table 3. In embodiments, a CRISPR/Cas system of the present invention comprises a gRNA molecule comprising a targeting sequence that is a sequence listed in Table 3.

TABLE 3

| | | | | Location of | | SEQ |
|---|---|---|---|---|---|---|
| | | TARGET | | Genomic Target | | ID |
| ID | TARGET | REGION | STRAND | Sequence (hg38) | gRNA Targeting sequence | NO: |
| 54790_1_1 | TET2 | EXON | + | chr4: 105145928-105145948 | UGUCGGGUCUUUAAAAAUAC | 73 |
| 54790_1_3 | TET2 | EXON | + | chr4: 105145945-105145965 | UACAGGCCCCUAAAGCACUA | 74 |
| 54790_1_4 | TET2 | EXON | + | chr4: 105145946-105145966 | ACAGGCCCCUAAAGCACUAA | 75 |
| 54790_1_5 | TET2 | EXON | + | chr4: 105145957-105145977 | AAGCACUAAGGGCAUGCCCU | 76 |
| 54790_1_8 | TET2 | EXON | + | chr4: 105145966-105145986 | GGGCAUGCCCUCGGUGAAAC | 77 |
| 54790_1_10 | TET2 | EXON | + | chr4: 105145967-105145987 | GGCAUGCCCUCGGUGAAACA | 78 |
| 54790_1_12 | TET2 | EXON | + | chr4: 105145968-105145988 | GCAUGCCCUCGGUGAAACAG | 79 |
| 54790_1_20 | TET2 | EXON | + | chr4: 105146006-105146026 | UGAGAUUAAAGCGACAGAAA | 80 |
| 54790_1_23 | TET2 | EXON | + | chr4: 105146007-105146027 | GAGAUUAAAGCGACAGAAAA | 81 |
| 54790_1_25 | TET2 | EXON | + | chr4: 105146012-105146032 | UAAAGCGACAGAAAAGGGAA | 82 |
| 54790_1_30 | TET2 | EXON | + | chr4: 105146021-105146041 | AGAAAAGGGAAAGGAGAGCG | 83 |
| 54790_1_31 | TET2 | EXON | + | chr4: 105146022-105146042 | GAAAAGGGAAAGGAGAGCGC | 84 |
| 54790_1_33 | TET2 | EXON | + | chr4: 105146028-105146048 | GGAAAGGAGAGCGCGGGCAA | 85 |
| 54790_1_35 | TET2 | EXON | + | chr4: 105146029-105146049 | GAAAGGAGAGCGCGGGCAAC | 86 |
| 54790_1_38 | TET2 | EXON | + | chr4: 105146038-105146058 | GCGCGGGCAACGGGAUCUAA | 87 |
| 54790_1_39 | TET2 | EXON | + | chr4: 105146039-105146059 | CGCGGGCAACGGGAUCUAAA | 88 |
| 54790_1_43 | TET2 | EXON | + | chr4: 105146053-105146073 | UCUAAAGGGAGAUAGAGACG | 89 |
| 54790_1_44 | TET2 | EXON | + | chr4: 105146054-105146074 | CUAAAGGGAGAUAGAGACGC | 90 |
| 54790_1_47 | TET2 | EXON | + | chr4: 105146063-105146083 | GAUAGAGACGCGGGCCUCUG | 91 |
| 54790_1_48 | TET2 | EXON | + | chr4: 105146064-105146084 | AUAGAGACGCGGGCCUCUGA | 92 |
| 54790_1_49 | TET2 | EXON | + | chr4: 105146069-105146089 | GACGCGGGCCUCUGAGGGUA | 93 |
| 54790_1_51 | TET2 | EXON | + | chr4: 105146072-105146092 | GCGGGCCUCUGAGGGUAAGG | 94 |
| 54790_1_52 | TET2 | EXON | + | chr4: 105146073-105146093 | CGGGCCUCUGAGGGUAAGGU | 95 |
| 54790_1_54 | TET2 | EXON | + | chr4: 105146082-105146102 | GAGGGUAAGGUGGGCGCAAG | 96 |
| 54790_1_61 | TET2 | EXON | − | chr4: 105145954-105145974 | GCAUGCCCUUAGUGCUUUAG | 97 |
| 54790_1_62 | TET2 | EXON | − | chr4: 105145955-105145975 | GGCAUGCCCUUAGUGCUUUA | 98 |
| 54790_1_64 | TET2 | EXON | − | chr4: 105145956-105145976 | GGGCAUGCCCUUAGUGCUUU | 99 |
| 54790_1_68 | TET2 | EXON | − | chr4: 105145976-105145996 | GCGCUCCCCUGUUUCACCGA | 100 |
| 54790_1_69 | TET2 | EXON | − | chr4: 105145977-105145997 | AGCGCUCCCCUGUUUCACCG | 101 |
| 54790_1_87 | TET2 | EXON | − | chr4: 105146080-105146100 | UGCGCCCACCUUACCCUCAG | 102 |
| 54790_2_1 | TET2 | EXON | + | chr4: 105146669-105146689 | AGAGCCGGCGGUAGCGGCAG | 103 |
| 54790_2_2 | TET2 | EXON | + | chr4: 105146675-105146695 | GGCGGUAGCGGCAGUGGCAG | 104 |
| 54790_2_6 | TET2 | EXON | + | chr4: 105146686-105146706 | CAGUGGCAGCGGCGAGAGCU | 105 |
| 54790_2_7 | TET2 | EXON | + | chr4: 105146687-105146707 | AGUGGCAGCGGCGAGAGCUU | 106 |
| 54790_2_8 | TET2 | EXON | + | chr4: 105146690-105146710 | GGCAGCGGCGAGAGCUUGGG | 107 |
| 54790_2_12 | TET2 | EXON | + | chr4: 105146725-105146745 | CCUCGCGAGCGCCGCGCGCC | 108 |
| 54790_2_13 | TET2 | EXON | + | chr4: 105146726-105146746 | CUCGCGAGCGCCGCGCGCCC | 109 |
| 54790_2_14 | TET2 | EXON | + | chr4: 105146761-105146781 | GCAAGUCACGUCCGCCCCCU | 110 |
| 54790_2_15 | TET2 | EXON | + | chr4: 105146766-105146786 | UCACGUCCGCCCCCUCGGCG | 111 |
| 54790_2_17 | TET2 | EXON | + | chr4: 105146783-105146803 | GCGCGGCCGCCCCGAGACGC | 112 |
| 54790_2_24 | TET2 | EXON | + | chr4: 105146836-105146856 | CUGCCUUAUGAAUAUUGAUG | 113 |
| 54790_2_25 | TET2 | EXON | + | chr4: 105146839-105146859 | CCUUAUGAAUAUUGAUGCGG | 114 |
| 54790_2_27 | TET2 | EXON | + | chr4: 105146844-105146864 | UGAAUAUUGAUGCGGAGGCU | 115 |
| 54790_2_34 | TET2 | EXON | + | chr4: 105146868-105146888 | UGCUUUCGUAGAGAAGCAGA | 116 |
| 54790_2_37 | TET2 | EXON | + | chr4: 105146879-105146899 | AGAAGCAGAAGGAAGCAAGA | 117 |
| 54790_2_39 | TET2 | EXON | + | chr4: 105146891-105146911 | AAGCAAGAUGGCUGCCCUUU | 118 |
| 54790_2_44 | TET2 | EXON | + | chr4: 105146905-105146925 | CCCUUUAGGAUUUGUUAGAA | 119 |
| 54790_2_51 | TET2 | EXON | + | chr4: 105146926-105146946 | GGAGACCCGACUGCAACUGC | 120 |
| 54790_2_52 | TET2 | EXON | + | chr4: 105146938-105146958 | GCAACUGCUGGAUUGCUGCA | 121 |
| 54790_2_56 | TET2 | EXON | + | chr4: 105146944-105146964 | GCUGGAUUGCUGCAAGGCUG | 122 |
| 54790_2_57 | TET2 | EXON | + | chr4: 105146945-105146965 | CUGGAUUGCUGCAAGGCUGA | 123 |
| 54790_2_62 | TET2 | EXON | + | chr4: 105146957-105146977 | AAGGCUGAGGGACGAGAACG | 124 |
| 54790_2_64 | TET2 | EXON | − | chr4: 105146676-105146696 | GCUGCCACUGCCGCUACCGC | 125 |
| 54790_2_65 | TET2 | EXON | − | chr4: 105146716-105146736 | CGCUCGCGAGGAGGCGGCGG | 126 |
| 54790_2_66 | TET2 | EXON | − | chr4: 105146719-105146739 | CGGCGCUCGCGAGGAGGCGG | 127 |
| 54790_2_67 | TET2 | EXON | − | chr4: 105146722-105146742 | GCGCGGCGCUCGCGAGGAGG | 128 |
| 54790_2_68 | TET2 | EXON | − | chr4: 105146725-105146745 | GGCGCGCGGCGCUCGCGAGG | 129 |
| 54790_2_69 | TET2 | EXON | − | chr4: 105146728-105146748 | CCGGGCGCGCGGCGCUCGCG | 130 |
| 54790_2_74 | TET2 | EXON | − | chr4: 105146739-105146759 | GCGAGCGGGACCCGGGCGCG | 131 |
| 54790_2_75 | TET2 | EXON | − | chr4: 105146746-105146766 | CUUGCAUGCGAGCGGGACCC | 132 |
| 54790_2_76 | TET2 | EXON | − | chr4: 105146747-105146767 | ACUUGCAUGCGAGCGGGACC | 133 |
| 54790_2_78 | TET2 | EXON | − | chr4: 105146753-105146773 | GACGUGACUUGCAUGCGAGC | 134 |
| 54790_2_79 | TET2 | EXON | − | chr4: 105146754-105146774 | GGACGUGACUUGCAUGCGAG | 135 |
| 54790_2_83 | TET2 | EXON | − | chr4: 105146775-105146795 | GGGCGGCCGCGCCGAGGGGG | 136 |
| 54790_2_85 | TET2 | EXON | − | chr4: 105146778-105146798 | UCGGGGCGGCCGCGCCGAGG | 137 |
| 54790_2_86 | TET2 | EXON | − | chr4: 105146779-105146799 | CUCGGGGCGGCCGCGCCGAG | 138 |
| 54790_2_88 | TET2 | EXON | − | chr4: 105146780-105146800 | UCUCGGGGCGGCCGCGCCGA | 139 |
| 54790_2_89 | TET2 | EXON | − | chr4: 105146781-105146801 | GUCUCGGGGCGGCCGCGCCG | 140 |
| 54790_2_93 | TET2 | EXON | − | chr4: 105146792-105146812 | GCGGGGCCGGCGUCUCGGGG | 141 |
| 54790_2_94 | TET2 | EXON | − | chr4: 105146795-105146815 | UCAGCGGGGCCGGCGUCUCG | 142 |
| 54790_2_95 | TET2 | EXON | − | chr4: 105146796-105146816 | CUCAGCGGGGCCGGCGUCUC | 143 |
| 54790_2_97 | TET2 | EXON | − | chr4: 105146797-105146817 | ACUCAGCGGGGCCGGCGUCU | 144 |
| 54790_2_100 | TET2 | EXON | − | chr4: 105146805-105146825 | UUCUCAUCACUCAGCGGGGC | 145 |
| 54790_2_101 | TET2 | EXON | − | chr4: 105146809-105146829 | UCUGUUCUCAUCACUCAGCG | 146 |
| 54790_2_103 | TET2 | EXON | − | chr4: 105146810-105146830 | GUCUGUUCUCAUCACUCAGC | 147 |
| 54790_2_106 | TET2 | EXON | − | chr4: 105146811-105146831 | CGUCUGUUCUCAUCACUCAG | 148 |
| 54790_2_109 | TET2 | EXON | − | chr4: 105146842-105146862 | CCUCCGCAUCAAUAUUCAUA | 149 |
| 54790_2_117 | TET2 | EXON | − | chr4: 105146908-105146928 | CCUUUCUAACAAAUCCUAAA | 150 |
| 54790_2_118 | TET2 | EXON | − | chr4: 105146909-105146929 | UCCUUUCUAACAAAUCCUAA | 151 |
| 54790_2_122 | TET2 | EXON | − | chr4: 105146934-105146954 | GCAAUCCAGCAGUUGCAGUC | 152 |
| 54790_2_123 | TET2 | EXON | − | chr4: 105146935-105146955 | AGCAAUCCAGCAGUUGCAGU | 153 |
| 54790_3_1 | TET2 | EXON | + | chr4: 105190341-105190361 | AAACUCUGUCUUCUCUAGGC | 154 |
| 54790_3_13 | TET2 | EXON | + | chr4: 105190411-105190431 | UCCUGUUGAGUUACAACGCU | 155 |
| 54790_3_16 | TET2 | EXON | + | chr4: 105190418-105190438 | GAGUUACAACGCUUGGAAGC | 156 |
| 54790_3_19 | TET2 | EXON | + | chr4: 105190424-105190444 | CAACGCUUGGAAGCAGGAGA | 157 |
| 54790_3_21 | TET2 | EXON | + | chr4: 105190425-105190445 | AACGCUUGGAAGCAGGAGAU | 158 |
| 54790_3_24 | TET2 | EXON | + | chr4: 105190444-105190464 | UGGGCUCAGCAGCAGCCAAU | 159 |
| 54790_3_26 | TET2 | EXON | + | chr4: 105190456-105190476 | CAGCCAAUAGGACAUGAUCC | 160 |
| 54790_3_30 | TET2 | EXON | + | chr4: 105190469-105190489 | AUGAUCCAGGAAGAGCAGUA | 161 |
| 54790_3_32 | TET2 | EXON | + | chr4: 105190470-105190490 | UGAUCCAGGAAGAGCAGUAA | 162 |
| 54790_3_34 | TET2 | EXON | + | chr4: 105190483-105190503 | GCAGUAAGGGACUGAGCUGC | 163 |
| 54790_3_37 | TET2 | EXON | + | chr4: 105190494-105190514 | CUGAGCUGCUGGUAAGACAG | 164 |
| 54790_3_46 | TET2 | EXON | − | chr4: 105190385-105190405 | GCAAGUAAACAAUCUUGAGA | 165 |
| 54790_3_47 | TET2 | EXON | − | chr4: 105190386-105190406 | GGCAAGUAAACAAUCUUGAG | 166 |
| 54790_3_52 | TET2 | EXON | − | chr4: 105190407-105190427 | UUGUAACUCAACAGGAGCAA | 167 |
| 54790_3_55 | TET2 | EXON | − | chr4: 105190415-105190435 | UCCAAGCGUUGUAACUCAAC | 168 |
| 54790_3_60 | TET2 | EXON | − | chr4: 105190462-105190482 | CUUCCUGGAUCAUGUCCUAU | 169 |
| 54790_3_62 | TET2 | EXON | − | chr4: 105190477-105190497 | CAGUCCCUUACUGCUCUUCC | 170 |
| 54790_4_7 | TET2 | EXON | + | chr4: 105233887-105233907 | GCUCUUUAGAAUUCAACUAG | 171 |
| 54790_4_8 | TET2 | EXON | + | chr4: 105233888-105233908 | CUCUUUAGAAUUCAACUAGA | 172 |
| 54790_4_12 | TET2 | EXON | + | chr4: 105233899-105233919 | UCAACUAGAGGGCAGCCUUG | 173 |
| 54790_4_14 | TET2 | EXON | + | chr4: 105233903-105233923 | CUAGAGGGCAGCCUUGUGGA | 174 |
| 54790_4_19 | TET2 | EXON | + | chr4: 105233923-105233943 | UGGCCCCGAAGCAAGCCUGA | 175 |
| 54790_4_21 | TET2 | EXON | + | chr4: 105233929-105233949 | CGAAGCAAGCCUGAUGGAAC | 176 |
| 54790_4_25 | TET2 | EXON | + | chr4: 105233950-105233970 | GGAUAGAACCAACCAUGUUG | 177 |
| 54790_4_26 | TET2 | EXON | + | chr4: 105233951-105233971 | GAUAGAACCAACCAUGUUGA | 178 |
| 54790_4_30 | TET2 | EXON | + | chr4: 105234010-105234030 | CAUUUGCCAGACAGAACCUC | 179 |
| 54790_4_37 | TET2 | EXON | + | chr4: 105234029-105234049 | CUGGCUACAAAGCUCCAGAA | 180 |
| 54790_4_44 | TET2 | EXON | + | chr4: 105234068-105234088 | AGAGCUCAUCCAGAAGUAAA | 181 |
| 54790_4_45 | TET2 | EXON | + | chr4: 105234081-105234101 | AAGUAAAUGGAGACACCAAG | 182 |
| 54790_4_47 | TET2 | EXON | + | chr4: 105234104-105234124 | CACUCUUUCAAAAGUUAUUA | 183 |
| 54790_4_54 | TET2 | EXON | + | chr4: 105234121-105234141 | UUAUGGAAUACCCUGUAUGA | 184 |
| 54790_4_57 | TET2 | EXON | + | chr4: 105234122-105234142 | UAUGGAAUACCCUGUAUGAA | 185 |
| 54790_4_66 | TET2 | EXON | + | chr4: 105234170-105234190 | GACUUUACACAAGAAAGUAG | 186 |
| 54790_4_67 | TET2 | EXON | + | chr4: 105234171-105234191 | ACUUUACACAAGAAAGUAGA | 187 |
| 54790_4_72 | TET2 | EXON | + | chr4: 105234194-105234214 | UAUUCCAAGUGUUUGCAAAA | 188 |
| 54790_4_74 | TET2 | EXON | + | chr4: 105234197-105234217 | UCCAAGUGUUUGCAAAAUGG | 189 |
| 54790_4_81 | TET2 | EXON | + | chr4: 105234233-105234253 | GUUAGUGAACCUUCUCUCUC | 190 |
| 54790_4_82 | TET2 | EXON | + | chr4: 105234234-105234254 | UUAGUGAACCUUCUCUCUCU | 191 |
| 54790_4_89 | TET2 | EXON | + | chr4: 105234271-105234291 | GAAAUUGAAACAAGACCAAA | 192 |
| 54790_4_93 | TET2 | EXON | + | chr4: 105234278-105234298 | AAACAAGACCAAAAGGCUAA | 193 |
| 54790_4_97 | TET2 | EXON | + | chr4: 105234296-105234316 | AAUGGAGAAAGACGUAACUU | 194 |
| 54790_4_99 | TET2 | EXON | + | chr4: 105234297-105234317 | AUGGAGAAAGACGUAACUUC | 195 |
| 54790_4_100 | TET2 | EXON | + | chr4: 105234298-105234318 | UGGAGAAAGACGUAACUUCG | 196 |
| 54790_4_106 | TET2 | EXON | + | chr4: 105234320-105234340 | GUAAGCCAAGAAAGAAAUCC | 197 |
| 54790_4_123 | TET2 | EXON | + | chr4: 105234437-105234457 | UUUUCAACACAUAACUGCAG | 198 |
| 54790_4_124 | TET2 | EXON | + | chr4: 105234438-105234458 | UUUCAACACAUAACUGCAGU | 199 |
| 54790_4_134 | TET2 | EXON | + | chr4: 105234475-105234495 | GCUUCAGAUUCUGAAUGAGC | 200 |
| 54790_4_138 | TET2 | EXON | + | chr4: 105234478-105234498 | UCAGAUUCUGAAUGAGCAGG | 201 |
| 54790_4_140 | TET2 | EXON | + | chr4: 105234479-105234499 | CAGAUUCUGAAUGAGCAGGA | 202 |
| 54790_4_141 | TET2 | EXON | + | chr4: 105234480-105234500 | AGAUUCUGAAUGAGCAGGAG | 203 |
| 54790_4_147 | TET2 | EXON | + | chr4: 105234529-105234549 | CAUUGUAUUACUUAAAAACA | 204 |
| 54790_4_151 | TET2 | EXON | + | chr4: 105234548-105234568 | AAGGCAGUGCUAAUGCCUAA | 205 |
| 54790_4_153 | TET2 | EXON | + | chr4: 105234574-105234594 | UACAGUUUCUGCCUCUUCCG | 206 |
| 54790_4_157 | TET2 | EXON | + | chr4: 105234587-105234607 | UCUUCCGUGGAACACACACA | 207 |
| 54790_4_161 | TET2 | EXON | + | chr4: 105234598-105234618 | ACACACACAUGGUGAACUCC | 208 |
| 54790_4_163 | TET2 | EXON | + | chr4: 105234643-105234663 | UCCAGAUUGUGUUUCCAUUG | 209 |
| 54790_4_171 | TET2 | EXON | + | chr4: 105234685-105234705 | CAUAAAUGCCAUUAACAGUC | 210 |
| 54790_4_177 | TET2 | EXON | + | chr4: 105234734-105234754 | ACUCACCCAUCGCAUACCUC | 211 |
| 54790_4_178 | TET2 | EXON | + | chr4: 105234735-105234755 | CUCACCCAUCGCAUACCUCA | 212 |
| 54790_4_181 | TET2 | EXON | + | chr4: 105234793-105234813 | GCCUCCAAAGCCAGCUGCAG | 213 |
| 54790_4_184 | TET2 | EXON | + | chr4: 105234802-105234822 | GCCAGCUGCAGUGGUGAGUG | 214 |
| 54790_4_200 | TET2 | EXON | + | chr4: 105234943-105234963 | UCCUGCAGAAAAUAACAUCC | 215 |
| 54790_4_201 | TET2 | EXON | + | chr4: 105234944-105234964 | CCUGCAGAAAAUAACAUCCA | 216 |
| 54790_4_203 | TET2 | EXON | + | chr4: 105234965-105234985 | GGAACCACAAAGCUAGCGUC | 217 |
| 54790_4_207 | TET2 | EXON | + | chr4: 105234983-105235003 | UCUGGUGAAGAAUUCUGUUC | 218 |
| 54790_4_211 | TET2 | EXON | + | chr4: 105235010-105235030 | AGCAGCAAUUUGCAAGCUCC | 219 |
| 54790_4_212 | TET2 | EXON | + | chr4: 105235013-105235033 | AGCAAUUUGCAAGCUCCUGG | 220 |
| 54790_4_216 | TET2 | EXON | + | chr4: 105235026-105235046 | CUCCUGGUGGCAGCUCUGAA | 221 |
| 54790_4_219 | TET2 | EXON | + | chr4: 105235052-105235072 | UUAAAACAAAAUGAAAUGAA | 222 |
| 54790_4_225 | TET2 | EXON | + | chr4: 105235087-105235107 | GCAAAGCUCAGUGUUCACUA | 223 |
| 54790_4_235 | TET2 | EXON | + | chr4: 105235162-105235182 | UCCCCCUCCUCCUCUUCCAC | 224 |
| 54790_4_240 | TET2 | EXON | + | chr4: 105235184-105235204 | GUUCCUCAGCUUCCUUCAGA | 225 |
| 54790_4_245 | TET2 | EXON | + | chr4: 105235202-105235222 | GAAGGAAAAAGCACUCUGAA | 226 |
| 54790_4_247 | TET2 | EXON | + | chr4: 105235205-105235225 | GGAAAAAGCACUCUGAAUGG | 227 |
| 54790_4_256 | TET2 | EXON | + | chr4: 105235260-105235280 | AAAGUAACACAACACUUUUA | 228 |
| 54790_4_258 | TET2 | EXON | + | chr4: 105235261-105235281 | AAGUAACACAACACUUUUAA | 229 |
| 54790_4_262 | TET2 | EXON | + | chr4: 105235276-105235296 | UUUAAGGGAAGUGAAAAUAG | 230 |
| 54790_4_263 | TET2 | EXON | + | chr4: 105235277-105235297 | UUAAGGGAAGUGAAAAUAGA | 231 |
| 54790_4_268 | TET2 | EXON | + | chr4: 105235288-105235308 | GAAAAUAGAGGGUAAACCUG | 232 |
| 54790_4_272 | TET2 | EXON | + | chr4: 105235356-105235376 | CUUCUCCGAUGCUUUCUGAA | 233 |
| 54790_4_280 | TET2 | EXON | + | chr4: 105235380-105235400 | CUCAGAAUAAUUGUGUGAAC | 234 |
| 54790_4_284 | TET2 | EXON | + | chr4: 105235400-105235420 | AGGAAUGACAUACAGACUGC | 235 |
| 54790_4_286 | TET2 | EXON | + | chr4: 105235401-105235421 | GGAAUGACAUACAGACUGCA | 236 |
| 54790_4_294 | TET2 | EXON | + | chr4: 105235478-105235498 | AAGCAUAACCCACCAAUUUU | 237 |
| 54790_4_297 | TET2 | EXON | + | chr4: 105235487-105235507 | CCACCAAUUUUUGGUAGCAG | 238 |
| 54790_4_302 | TET2 | EXON | + | chr4: 105235498-105235518 | UGGUAGCAGUGGAGAGCUAC | 239 |
| 54790_4_313 | TET2 | EXON | + | chr4: 105235546-105235566 | CAAAGAGCAAGAGAUUCUGA | 240 |
| 54790_4_314 | TET2 | EXON | + | chr4: 105235547-105235567 | AAAGAGCAAGAGAUUCUGAA | 241 |
| 54790_4_317 | TET2 | EXON | + | chr4: 105235558-105235578 | GAUUCUGAAGGGUCGAGACA | 242 |
| 54790_4_324 | TET2 | EXON | + | chr4: 105235607-105235627 | ACACAGCACUAUCUGAAACC | 243 |
| 54790_4_326 | TET2 | EXON | + | chr4: 105235611-105235631 | AGCACUAUCUGAAACCAGGA | 244 |
| 54790_4_329 | TET2 | EXON | + | chr4: 105235624-105235644 | ACCAGGAUGGAUUGAAUUGA | 245 |
| 54790_4_333 | TET2 | EXON | + | chr4: 105235645-105235665 | GGCCCCUCGUUUUCACCAAG | 246 |
| 54790_4_339 | TET2 | EXON | + | chr4: 105235669-105235689 | AUCCCAUCUAAAACGUAAUG | 247 |
| 54790_4_343 | TET2 | EXON | + | chr4: 105235739-105235759 | AUGACCUCCAAACAAUACAC | 248 |
| 54790_4_347 | TET2 | EXON | + | chr4: 105235757-105235777 | ACUGGAAAUUCCAACAUGCC | 249 |
| 54790_4_349 | TET2 | EXON | + | chr4: 105235758-105235778 | CUGGAAAUUCCAACAUGCCU | 250 |
| 54790_4_351 | TET2 | EXON | + | chr4: 105235759-105235779 | UGGAAAUUCCAACAUGCCUG | 251 |
| 54790_4_352 | TET2 | EXON | + | chr4: 105235760-105235780 | GGAAAUUCCAACAUGCCUGG | 252 |
| 54790_4_353 | TET2 | EXON | + | chr4: 105235761-105235781 | GAAAUUCCAACAUGCCUGGG | 253 |
| 54790_4_355 | TET2 | EXON | + | chr4: 105235770-105235790 | ACAUGCCUGGGGGGCUCCCA | 254 |
| 54790_4_360 | TET2 | EXON | + | chr4: 105235801-105235821 | CACCCAGAAAACAACACAGC | 255 |
| 54790_4_365 | TET2 | EXON | + | chr4: 105235841-105235861 | UACCAAGUUGAAAUGAAUCA | 256 |
| 54790_4_366 | TET2 | EXON | + | chr4: 105235842-105235862 | ACCAAGUUGAAAUGAAUCAA | 257 |
| 54790_4_368 | TET2 | EXON | + | chr4: 105235853-105235873 | AUGAAUCAAGGGCAGUCCCA | 258 |
| 54790_4_370 | TET2 | EXON | + | chr4: 105235861-105235881 | AGGGCAGUCCCAAGGUACAG | 259 |
| 54790_4_371 | TET2 | EXON | + | chr4: 105235897-105235917 | GUUCCAAAAACCCUCACACC | 260 |
| 54790_4_376 | TET2 | EXON | + | chr4: 105235952-105235972 | GCUCAUGUGCAGUCACUGUG | 261 |
| 54790_4_388 | TET2 | EXON | + | chr4: 105236038-105236058 | GAAACAGCACUUGAAUCAAC | 262 |
| 54790_4_399 | TET2 | EXON | + | chr4: 105236098-105236118 | GCAACAUAAGCCUCAUAAAC | 263 |
| 54790_4_407 | TET2 | EXON | + | chr4: 105236182-105236202 | AUUACAAAUAAAGAAUAAAG | 264 |
| 54790_4_416 | TET2 | EXON | + | chr4: 105236237-105236257 | AACAAUGAUCAGCAAAGAGA | 265 |
| 54790_4_417 | TET2 | EXON | + | chr4: 105236249-105236269 | CAAAGAGAAGGAUCAUUCUU | 266 |
| 54790_4_419 | TET2 | EXON | + | chr4: 105236263-105236283 | AUUCUUUGGCCAGACUAAAG | 267 |
| 54790_4_426 | TET2 | EXON | + | chr4: 105236279-105236299 | AAAGUGGAAGAAUGUUUUCA | 268 |
| 54790_4_435 | TET2 | EXON | + | chr4: 105236332-105236352 | CGAGACUCAUAAUGUCCAAA | 269 |
| 54790_4_438 | TET2 | EXON | + | chr4: 105236333-105236353 | GAGACUCAUAAUGUCCAAAU | 270 |
| 54790_4_440 | TET2 | EXON | + | chr4: 105236338-105236358 | UCAUAAUGUCCAAAUGGGAC | 271 |
| 54790_4_444 | TET2 | EXON | + | chr4: 105236341-105236361 | UAAUGUCCAAAUGGGACUGG | 272 |
| 54790_4_452 | TET2 | EXON | + | chr4: 105236413-105236433 | AUCAAGUGCAUGCAAAAUAC | 273 |
| 54790_4_466 | TET2 | EXON | + | chr4: 105236486-105236506 | ACACAUCCUGAACUUUUUGC | 274 |
| 54790_4_475 | TET2 | EXON | + | chr4: 105236562-105236582 | CAAAGCAAGAUCUUCUUCAC | 275 |
| 54790_4_479 | TET2 | EXON | + | chr4: 105236578-105236598 | UCACAGGUGCUUUCAAGAAC | 276 |
| 54790_4_486 | TET2 | EXON | + | chr4: 105236611-105236631 | ACAACAAGCUUCAGUUCUAC | 277 |
| 54790_4_488 | TET2 | EXON | + | chr4: 105236612-105236632 | CAACAAGCUUCAGUUCUACA | 278 |
| 54790_4_493 | TET2 | EXON | + | chr4: 105236642-105236662 | AAUAGAAACCAAGAUAUGUC | 279 |
| 54790_4_494 | TET2 | EXON | + | chr4: 105236673-105236693 | CUGCGCAACUUGCUCAGCAA | 280 |
| 54790_4_498 | TET2 | EXON | + | chr4: 105236719-105236739 | UGUUUUUCCUGUGCCUGACC | 281 |
| 54790_4_501 | TET2 | EXON | + | chr4: 105236720-105236740 | GUUUUUCCUGUGCCUGACCA | 282 |
| 54790_4_503 | TET2 | EXON | + | chr4: 105236723-105236743 | UUUCCUGUGCCUGACCAGGG | 283 |
| 54790_4_511 | TET2 | EXON | + | chr4: 105236752-105236772 | CACUCAGACCCCUCCCCAGA | 284 |
| 54790_4_512 | TET2 | EXON | + | chr4: 105236778-105236798 | CUCAAAAGCAUGCUGCUCUA | 285 |
| 54790_4_513 | TET2 | EXON | + | chr4: 105236781-105236801 | AAAAGCAUGCUGCUCUAAGG | 286 |
| 54790_4_518 | TET2 | EXON | + | chr4: 105236856-105236876 | CUUGCCAUAGUCAGAUGCAC | 287 |
| 54790_4_520 | TET2 | EXON | + | chr4: 105236866-105236886 | UCAGAUGCACAGGCCAAUUA | 288 |
| 54790_4_522 | TET2 | EXON | + | chr4: 105236869-105236889 | GAUGCACAGGCCAAUUAAGG | 289 |
| 54790_4_525 | TET2 | EXON | + | chr4: 105236876-105236896 | AGGCCAAUUAAGGUGGAACC | 290 |
| 54790_4_531 | TET2 | EXON | + | chr4: 105236928-105236948 | CACCACCAGAAAACAAAACA | 291 |
| 54790_4_532 | TET2 | EXON | + | chr4: 105236935-105236955 | AGAAAACAAAACAUGGAAAA | 292 |
| 54790_4_540 | TET2 | EXON | + | chr4: 105237004-105237024 | AAAGAGCAUCAUUGAGACCA | 293 |
| 54790_4_545 | TET2 | EXON | + | chr4: 105237052-105237072 | CAAGUCGUUAUUUGACCAUA | 294 |
| 54790_4_553 | TET2 | EXON | + | chr4: 105237098-105237118 | CAAGUAAAAGUUGAAAUGUC | 295 |
| 54790_4_554 | TET2 | EXON | + | chr4: 105237099-105237119 | AAGUAAAAGUUGAAAUGUCA | 296 |
| 54790_4_578 | TET2 | EXON | + | chr4: 105237280-105237300 | UACUCCUAUAAAAAAUUUAU | 297 |
| 54790_4_582 | TET2 | EXON | + | chr4: 105237329-105237349 | UUCCCAUCUUGCAGAUGUGU | 298 |
| 54790_4_589 | TET2 | EXON | + | chr4: 105237359-105237379 | CAGAAAUGUACUGAGACACA | 299 |
| 54790_4_596 | TET2 | EXON | + | chr4: 105237397-105237417 | AGCAAAUUUAUCUUCAGAUA | 300 |
| 54790_4_597 | TET2 | EXON | + | chr4: 105237398-105237418 | GCAAAUUUAUCUUCAGAUAU | 301 |
| 54790_4_606 | TET2 | EXON | + | chr4: 105237430-105237450 | CUUUUUUUAAAUCUUGAGUC | 302 |
| 54790_4_614 | TET2 | EXON | + | chr4: 105237446-105237466 | AGUCUGGCAGCAAUUUGUAA | 303 |
| 54790_4_657 | TET2 | EXON | + | chr4: 105237650-105237670 | GCUCUUUGUAUAUUAUCUCC | 304 |
| 54790_4_662 | TET2 | EXON | + | chr4: 105237663-105237683 | UAUCUCCUGGAGAGACAGCU | 305 |
| 54790_4_668 | TET2 | EXON | + | chr4: 105237708-105237728 | AAUGAGAAAAUAACGACCAU | 306 |
| 54790_4_670 | TET2 | EXON | + | chr4: 105237748-105237768 | UUUAAAUAUUUUUUAAUUCA | 307 |
| 54790_4_679 | TET2 | EXON | + | chr4: 105237778-105237798 | UAUUAGUUUCACAAGAUUUC | 308 |
| 54790_4_682 | TET2 | EXON | + | chr4: 105237786-105237806 | UCACAAGAUUUCUGGCUAAU | 309 |
| 54790_4_686 | TET2 | EXON | + | chr4: 105237787-105237807 | CACAAGAUUUCUGGCUAAUA | 310 |
| 54790_4_693 | TET2 | EXON | + | chr4: 105237817-105237837 | UAUCUUCAGUCUUCAUGAGU | 311 |
| 54790_4_695 | TET2 | EXON | + | chr4: 105237818-105237838 | AUCUUCAGUCUUCAUGAGUU | 312 |
| 54790_4_697 | TET2 | EXON | + | chr4: 105237819-105237839 | UCUUCAGUCUUCAUGAGUUG | 313 |
| 54790_4_700 | TET2 | EXON | + | chr4: 105237820-105237840 | CUUCAGUCUUCAUGAGUUGG | 314 |
| 54790_4_709 | TET2 | EXON | + | chr4: 105237882-105237902 | CUUUUCUCCAUUUAUACAUU | 315 |
| 54790_4_741 | TET2 | EXON | + | chr4: 105240332-105240352 | AAAGCUUUUUGUUAAAAUUC | 316 |
| 54790_4_746 | TET2 | EXON | + | chr4: 105240344-105240364 | UAAAAUUCAGGAUAUGUAAU | 317 |
| 54790_4_750 | TET2 | EXON | + | chr4: 105240352-105240372 | AGGAUAUGUAAUAGGUCUGU | 318 |
| 54790_4_754 | TET2 | EXON | + | chr4: 105240377-105240397 | UAGUGAAAUAUUUUUGCUGA | 319 |
| 54790_4_760 | TET2 | EXON | + | chr4: 105240395-105240415 | GAUGGAUGUAGAUAUAUACG | 320 |
| 54790_4_770 | TET2 | EXON | + | chr4: 105240478-105240498 | AGACAAAUGUUAAAUUAGUG | 321 |
| 54790_4_780 | TET2 | EXON | + | chr4: 105240541-105240561 | GAUACCCCACACUGUGUAGA | 322 |
| 54790_4_783 | TET2 | EXON | + | chr4: 105240545-105240565 | CCCCACACUGUGUAGAAGGA | 323 |
| 54790_4_785 | TET2 | EXON | + | chr4: 105240548-105240568 | CACACUGUGUAGAAGGAUGG | 324 |
| 54790_4_787 | TET2 | EXON | + | chr4: 105240549-105240569 | ACACUGUGUAGAAGGAUGGA | 325 |
| 54790_4_790 | TET2 | EXON | + | chr4: 105240552-105240572 | CUGUGUAGAAGGAUGGAGGG | 326 |
| 54790_4_791 | TET2 | EXON | + | chr4: 105240579-105240599 | CUACUGUCCCUCUUUGCGUG | 327 |
| 54790_4_795 | TET2 | EXON | + | chr4: 105240599-105240619 | UGGUUAUUAAGUUGCCUCAC | 328 |
| 54790_4_796 | TET2 | EXON | + | chr4: 105240600-105240620 | GGUUAUUAAGUUGCCUCACU | 329 |
| 54790_4_800 | TET2 | EXON | + | chr4: 105240634-105240654 | CACAUCUCAUAGAUAAUAUU | 330 |
| 54790_4_807 | TET2 | EXON | + | chr4: 105240703-105240723 | UCCCACUUUUCCAUCUUUGU | 331 |
| 54790_4_818 | TET2 | EXON | + | chr4: 105240740-105240760 | UUCUUUUUGCCUGACUCUCC | 332 |
| 54790_4_829 | TET2 | EXON | + | chr4: 105240784-105240804 | UUCUAAAGUACAUACUAAUA | 333 |
| 54790_4_830 | TET2 | EXON | + | chr4: 105240785-105240805 | UCUAAAGUACAUACUAAUAU | 334 |
| 54790_4_833 | TET2 | EXON | + | chr4: 105240790-105240810 | AGUACAUACUAAUAUGGGUC | 335 |
| 54790_4_841 | TET2 | EXON | + | chr4: 105240833-105240853 | AAACAGCAAUUAAAUGUUAU | 336 |
| 54790_4_842 | TET2 | EXON | + | chr4: 105240834-105240854 | AACAGCAAUUAAAUGUUAUA | 337 |
| 54790_4_845 | TET2 | EXON | + | chr4: 105240841-105240861 | AUUAAAUGUUAUAGGGAAGU | 338 |
| 54790_4_851 | TET2 | EXON | + | chr4: 105240851-105240871 | AUAGGGAAGUAGGAAGAAAA | 339 |
| 54790_4_853 | TET2 | EXON | + | chr4: 105240852-105240872 | UAGGGAAGUAGGAAGAAAAA | 340 |
| 54790_4_855 | TET2 | EXON | + | chr4: 105240853-105240873 | AGGGAAGUAGGAAGAAAAAG | 341 |
| 54790_4_858 | TET2 | EXON | + | chr4: 105240885-105240905 | CAAUAAACCAAGCAAUAUUC | 342 |
| 54790_4_861 | TET2 | EXON | + | chr4: 105240886-105240906 | AAUAAACCAAGCAAUAUUCU | 343 |
| 54790_4_862 | TET2 | EXON | + | chr4: 105240887-105240907 | AUAAACCAAGCAAUAUUCUG | 344 |
| 54790_4_863 | TET2 | EXON | + | chr4: 105240888-105240908 | UAAACCAAGCAAUAUUCUGG | 345 |
| 54790_4_865 | TET2 | EXON | + | chr4: 105240891-105240911 | ACCAAGCAAUAUUCUGGGGG | 346 |
| 54790_4_867 | TET2 | EXON | + | chr4: 105240892-105240912 | CCAAGCAAUAUUCUGGGGGU | 347 |
| 54790_4_870 | TET2 | EXON | + | chr4: 105240902-105240922 | UUCUGGGGGUGGGAUAGAGC | 348 |
| 54790_4_880 | TET2 | EXON | + | chr4: 105240940-105240960 | UCUUUUAAAAUCCAAGUAAU | 349 |
| 54790_4_881 | TET2 | EXON | + | chr4: 105240944-105240964 | UUAAAAUCCAAGUAAUAGGU | 350 |
| 54790_4_891 | TET2 | EXON | + | chr4: 105240991-105241011 | UUUUUUCCAGCUCAAAAAAU | 351 |
| 54790_4_905 | TET2 | EXON | + | chr4: 105241063-105241083 | UUUGUUUAGUUUCAUUUAUU | 352 |
| 54790_4_929 | TET2 | EXON | + | chr4: 105241146-105241166 | UGUACAUAUACUUAAUUAUG | 353 |
| 54790_4_945 | TET2 | EXON | + | chr4: 105241237-105241257 | UAGAGCCCUUAAUGUGUAGU | 354 |
| 54790_4_949 | TET2 | EXON | + | chr4: 105241238-105241258 | AGAGCCCUUAAUGUGUAGUU | 355 |
| 54790_4_951 | TET2 | EXON | + | chr4: 105241239-105241259 | GAGCCCUUAAUGUGUAGUUG | 356 |
| 54790_4_953 | TET2 | EXON | + | chr4: 105241240-105241260 | AGCCCUUAAUGUGUAGUUGG | 357 |
| 54790_4_956 | TET2 | EXON | + | chr4: 105241253-105241273 | UAGUUGGGGGUUAAGCUUUG | 358 |
| 54790_4_962 | TET2 | EXON | + | chr4: 105241283-105241303 | CUUUAUAUUUAGUAUAAUUG | 359 |
| 54790_4_973 | TET2 | EXON | + | chr4: 105241340-105241360 | CAAAUUAUUGAAAAAGAUGA | 360 |
| 54790_4_977 | TET2 | EXON | + | chr4: 105241361-105241381 | GGUCCUUUUUAUACCCAUCU | 361 |
| 54790_4_979 | TET2 | EXON | + | chr4: 105241367-105241387 | UUUUAUACCCAUCUAGGAGC | 362 |
| 54790_4_984 | TET2 | EXON | + | chr4: 105241378-105241398 | UCUAGGAGCAGGUCCUAAUG | 363 |
| 54790_4_990 | TET2 | EXON | + | chr4: 105241399-105241419 | GGCAGCUAUUAGAGAAAUCA | 364 |
| 54790_4_993 | TET2 | EXON | + | chr4: 105241407-105241427 | UUAGAGAAAUCAUGGAAGAA | 365 |
| 54790_4_995 | TET2 | EXON | + | chr4: 105241422-105241442 | AAGAAAGGUAAUUAACGCAA | 366 |
| 54790_4_997 | TET2 | EXON | + | chr4: 105241428-105241448 | GGUAAUUAACGCAAAGGCAC | 367 |
| 54790_4_998 | TET2 | EXON | + | chr4: 105241429-105241449 | GUAAUUAACGCAAAGGCACA | 368 |
| 54790_4_1014 | TET2 | EXON | + | chr4: 105241523-105241543 | UAAAUUGAGUAAUUAUUAGU | 369 |
| 54790_4_1019 | TET2 | EXON | + | chr4: 105241538-105241558 | UUAGUAGGCUUAGCUAUUCU | 370 |
| 54790_4_1020 | TET2 | EXON | + | chr4: 105241539-105241559 | UAGUAGGCUUAGCUAUUCUA | 371 |
| 54790_4_1029 | TET2 | EXON | + | chr4: 105241592-105241612 | AGAGAGUCACAAUAUUUGAC | 372 |
| 54790_4_1032 | TET2 | EXON | + | chr4: 105241612-105241632 | AGGACUAAUAGUCUGCUAGC | 373 |
| 54790_4_1033 | TET2 | EXON | + | chr4: 105241618-105241638 | AAUAGUCUGCUAGCUGGCAC | 374 |
| 54790_4_1035 | TET2 | EXON | + | chr4: 105241636-105241656 | ACAGGCUGCCCACUUUGCGA | 375 |
| 54790_4_1040 | TET2 | EXON | + | chr4: 105241653-105241673 | CGAUGGAUGCCAGAAAACCC | 376 |
| 54790_4_1043 | TET2 | EXON | + | chr4: 105241663-105241683 | CAGAAAACCCAGGCAUGAAC | 377 |
| 54790_4_1045 | TET2 | EXON | + | chr4: 105241669-105241689 | ACCCAGGCAUGAACAGGAAU | 378 |
| 54790_4_1046 | TET2 | EXON | + | chr4: 105241678-105241698 | UGAACAGGAAUCGGCCAGCC | 379 |
| 54790_4_1047 | TET2 | EXON | + | chr4: 105241693-105241713 | CAGCCAGGCUGCCAGCCACA | 380 |
| 54790_4_1048 | TET2 | EXON | + | chr4: 105241699-105241719 | GGCUGCCAGCCACAAGGUAC | 381 |
| 54790_4_1049 | TET2 | EXON | + | chr4: 105241705-105241725 | CAGCCACAAGGUACUGGCAC | 382 |
| 54790_4_1052 | TET2 | EXON | + | chr4: 105241718-105241738 | CUGGCACAGGCUCCAACGAG | 383 |
| 54790_4_1053 | TET2 | EXON | + | chr4: 105241729-105241749 | UCCAACGAGAGGUCCCACUC | 384 |
| 54790_4_1058 | TET2 | EXON | + | chr4: 105241770-105241790 | AAGUGUCAAAGCAGAAAGAC | 385 |
| 54790_4_1059 | TET2 | EXON | + | chr4: 105241780-105241800 | GCAGAAAGACUGGUAAAGUG | 386 |
| 54790_4_1092 | TET2 | EXON | + | chr4: 105241946-105241966 | UUUUUUUCGCUAUCAAUCAC | 387 |
| 54790_4_1109 | TET2 | EXON | + | chr4: 105242012-105242032 | UGAGCGAGAUAAUGCAGAGA | 388 |
| 54790_4_1117 | TET2 | EXON | + | chr4: 105242057-105242077 | CUCUGAGCUGUUCUUCUUCU | 389 |
| 54790_4_1118 | TET2 | EXON | + | chr4: 105242058-105242078 | UCUGAGCUGUUCUUCUUCUA | 390 |
| 54790_4_1123 | TET2 | EXON | + | chr4: 105242076-105242096 | UAGGGUGCCUUUUCAUUAAG | 391 |
| 54790_4_1124 | TET2 | EXON | + | chr4: 105242080-105242100 | GUGCCUUUUCAUUAAGAGGU | 392 |
| 54790_4_1130 | TET2 | EXON | + | chr4: 105242105-105242125 | GUAUUAUUAUUAAAGUACUU | 393 |
| 54790_4_1135 | TET2 | EXON | + | chr4: 105242114-105242134 | UUAAAGUACUUAGGAUACAU | 394 |
| 54790_4_1136 | TET2 | EXON | + | chr4: 105242115-105242135 | UAAAGUACUUAGGAUACAUU | 395 |
| 54790_4_1137 | TET2 | EXON | + | chr4: 105242116-105242136 | AAAGUACUUAGGAUACAUUG | 396 |
| 54790_4_1140 | TET2 | EXON | + | chr4: 105242124-105242144 | UAGGAUACAUUGGGGCAGCU | 397 |
| 54790_4_1154 | TET2 | EXON | + | chr4: 105242210-105242230 | UUCACUAAAUAAUCAUCUAG | 398 |
| 54790_4_1156 | TET2 | EXON | + | chr4: 105242215-105242235 | UAAAUAAUCAUCUAGUGGCC | 399 |
| 54790_4_1162 | TET2 | EXON | + | chr4: 105242287-105242307 | UUGUUUUUUAAACAAGCAGU | 400 |
| 54790_4_1163 | TET2 | EXON | + | chr4: 105242290-105242310 | UUUUUUAAACAAGCAGUAGG | 401 |
| 54790_4_1164 | TET2 | EXON | + | chr4: 105242298-105242318 | ACAAGCAGUAGGUGGUGCUU | 402 |
| 54790_4_1167 | TET2 | EXON | + | chr4: 105242306-105242326 | UAGGUGGUGCUUUGGUCAUA | 403 |
| 54790_4_1169 | TET2 | EXON | + | chr4: 105242307-105242327 | AGGUGGUGCUUUGGUCAUAA | 404 |
| 54790_4_1173 | TET2 | EXON | + | chr4: 105242328-105242348 | GGAAGAUAUAGUCUAUUUCU | 405 |
| 54790_4_1176 | TET2 | EXON | + | chr4: 105242351-105242371 | ACUAUUCCAUAUUUUCCAUG | 406 |
| 54790_4_1178 | TET2 | EXON | + | chr4: 105242355-105242375 | UUCCAUAUUUUCCAUGUGGC | 407 |
| 54790_4_1187 | TET2 | EXON | + | chr4: 105242404-105242424 | UCUAAAUUGUGAGACAUUCU | 408 |
| 54790_4_1193 | TET2 | EXON | + | chr4: 105242407-105242427 | AAAUUGUGAGACAUUCUUGG | 409 |
| 54790_4_1201 | TET2 | EXON | + | chr4: 105242469-105242489 | UAAAAUAGCUAAAUUUAGUA | 410 |
| 54790_4_1205 | TET2 | EXON | + | chr4: 105242470-105242490 | AAAAUAGCUAAAUUUAGUAA | 411 |
| 54790_4_1241 | TET2 | EXON | + | chr4: 105242625-105242645 | AUCUGUACAUUUUGAUAUUG | 412 |
| 54790_4_1244 | TET2 | EXON | + | chr4: 105242635-105242655 | UUUGAUAUUGAGGAAAAACA | 413 |
| 54790_4_1250 | TET2 | EXON | + | chr4: 105242663-105242683 | AAACCAUUAUCCAGUUUGCU | 414 |
| 54790_4_1258 | TET2 | EXON | + | chr4: 105242705-105242725 | UAAUAAACCGUUCAUUUCUC | 415 |
| 54790_4_1259 | TET2 | EXON | + | chr4: 105242711-105242731 | ACCGUUCAUUUCUCAGGAUG | 416 |
| 54790_4_1269 | TET2 | EXON | − | chr4: 105233886-105233906 | UAGUUGAAUUCUAAAGAGCA | 417 |
| 54790_4_1276 | TET2 | EXON | − | chr4: 105233917-105233937 | UUGCUUCGGGGCCAUCCACA | 418 |
| 54790_4_1278 | TET2 | EXON | − | chr4: 105233929-105233949 | GUUCCAUCAGGCUUGCUUCG | 419 |
| 54790_4_1279 | TET2 | EXON | − | chr4: 105233930-105233950 | UGUUCCAUCAGGCUUGCUUC | 420 |
| 54790_4_1281 | TET2 | EXON | − | chr4: 105233931-105233951 | CUGUUCCAUCAGGCUUGCUU | 421 |
| 54790_4_1285 | TET2 | EXON | − | chr4: 105233941-105233961 | UGGUUCUAUCCUGUUCCAUC | 422 |
| 54790_4_1288 | TET2 | EXON | − | chr4: 105233961-105233981 | UCUGUUGCCCUCAACAUGGU | 423 |
| 54790_4_1289 | TET2 | EXON | − | chr4: 105233965-105233985 | UUAGUCUGUUGCCCUCAACA | 424 |
| 54790_4_1290 | TET2 | EXON | − | chr4: 105233990-105234010 | GGAGGUGAUGGUAUCAGGAA | 425 |
| 54790_4_1293 | TET2 | EXON | − | chr4: 105233995-105234015 | AAAUGGGAGGUGAUGGUAUC | 426 |
| 54790_4_1296 | TET2 | EXON | − | chr4: 105234002-105234022 | GUCUGGCAAAUGGGAGGUGA | 427 |
| 54790_4_1297 | TET2 | EXON | − | chr4: 105234008-105234028 | GGUUCUGUCUGGCAAAUGGG | 428 |
| 54790_4_1298 | TET2 | EXON | − | chr4: 105234011-105234031 | AGAGGUUCUGUCUGGCAAAU | 429 |
| 54790_4_1300 | TET2 | EXON | − | chr4: 105234012-105234032 | CAGAGGUUCUGUCUGGCAAA | 430 |
| 54790_4_1305 | TET2 | EXON | − | chr4: 105234019-105234039 | UUGUAGCCAGAGGUUCUGUC | 431 |
| 54790_4_1308 | TET2 | EXON | − | chr4: 105234029-105234049 | UUCUGGAGCUUUGUAGCCAG | 432 |
| 54790_4_1310 | TET2 | EXON | − | chr4: 105234046-105234066 | CAGGCAGUGGGCUUCCAUUC | 433 |
| 54790_4_1314 | TET2 | EXON | − | chr4: 105234058-105234078 | GAUGAGCUCUCUCAGGCAGU | 434 |
| 54790_4_1315 | TET2 | EXON | − | chr4: 105234059-105234079 | GGAUGAGCUCUCUCAGGCAG | 435 |
| 54790_4_1319 | TET2 | EXON | − | chr4: 105234065-105234085 | ACUUCUGGAUGAGCUCUCUC | 436 |
| 54790_4_1322 | TET2 | EXON | − | chr4: 105234080-105234100 | UUGGUGUCUCCAUUUACUUC | 437 |
| 54790_4_1327 | TET2 | EXON | − | chr4: 105234099-105234119 | ACUUUUGAAAGAGUGCCACU | 438 |
| 54790_4_1334 | TET2 | EXON | − | chr4: 105234134-105234154 | UUCUGGCUUCCCUUCAUACA | 439 |
| 54790_4_1335 | TET2 | EXON | − | chr4: 105234135-105234155 | AUUCUGGCUUCCCUUCAUAC | 440 |
| 54790_4_1337 | TET2 | EXON | − | chr4: 105234151-105234171 | CAGGACUCACACGACUAUUC | 441 |
| 54790_4_1341 | TET2 | EXON | − | chr4: 105234170-105234190 | CUACUUUCUUGUGUAAAGUC | 442 |
| 54790_4_1351 | TET2 | EXON | − | chr4: 105234201-105234221 | UCCUCCAUUUUGCAAACACU | 443 |
| 54790_4_1355 | TET2 | EXON | − | chr4: 105234245-105234265 | UGAAGGAGCCCAGAGAGAGA | 444 |
| 54790_4_1367 | TET2 | EXON | − | chr4: 105234262-105234282 | GUUUCAAUUUCUUGAUCUGA | 445 |
| 54790_4_1378 | TET2 | EXON | − | chr4: 105234289-105234309 | GUCUUUCUCCAUUAGCCUUU | 446 |
| 54790_4_1388 | TET2 | EXON | − | chr4: 105234328-105234348 | UUUCACCUGGAUUUCUUUCU | 447 |
| 54790_4_1392 | TET2 | EXON | − | chr4: 105234341-105234361 | UUUGGUUGACUGCUUUCACC | 448 |
| 54790_4_1396 | TET2 | EXON | − | chr4: 105234359-105234379 | UCACUCAAAUCGGAGACAUU | 449 |
| 54790_4_1399 | TET2 | EXON | − | chr4: 105234369-105234389 | UUCUUUCUUAUCACUCAAAU | 450 |
| 54790_4_1410 | TET2 | EXON | − | chr4: 105234408-105234428 | AUCUUUAACUGCAUUUUCUU | 451 |
| 54790_4_1411 | TET2 | EXON | − | chr4: 105234409-105234429 | AAUCUUUAACUGCAUUUUCU | 452 |
| 54790_4_1416 | TET2 | EXON | − | chr4: 105234435-105234455 | GCAGUUAUGUGUUGAAAAAC | 453 |
| 54790_4_1422 | TET2 | EXON | − | chr4: 105234464-105234484 | AUCUGAAGCUCUGGAUUUUC | 454 |
| 54790_4_1423 | TET2 | EXON | − | chr4: 105234473-105234493 | UCAUUCAGAAUCUGAAGCUC | 455 |
| 54790_4_1435 | TET2 | EXON | − | chr4: 105234520-105234540 | GUAAUACAAUGUUCUUGUCA | 456 |
| 54790_4_1441 | TET2 | EXON | − | chr4: 105234566-105234586 | GCAGAAACUGUAGCACCAUU | 457 |
| 54790_4_1444 | TET2 | EXON | − | chr4: 105234588-105234608 | AUGUGUGUGUUCCACGGAAG | 458 |
| 54790_4_1448 | TET2 | EXON | − | chr4: 105234594-105234614 | UUCACCAUGUGUGUGUUCCA | 459 |
| 54790_4_1457 | TET2 | EXON | − | chr4: 105234619-105234639 | AUUGAGACAGUGUUUUUUCC | 460 |
| 54790_4_1461 | TET2 | EXON | − | chr4: 105234647-105234667 | ACCGCAAUGGAAACACAAUC | 461 |
| 54790_4_1466 | TET2 | EXON | − | chr4: 105234660-105234680 | UGUGGUUUUCUGCACCGCAA | 462 |
| 54790_4_1471 | TET2 | EXON | − | chr4: 105234678-105234698 | AAUGGCAUUUAUGUGAGAUG | 463 |
| 54790_4_1474 | TET2 | EXON | − | chr4: 105234696-105234716 | AUUAGUAGCCUGACUGUUAA | 464 |
| 54790_4_1475 | TET2 | EXON | − | chr4: 105234726-105234746 | CGAUGGGUGAGUGAUCUCAC | 465 |
| 54790_4_1479 | TET2 | EXON | − | chr4: 105234742-105234762 | UCUGCCCUGAGGUAUGCGAU | 466 |
| 54790_4_1480 | TET2 | EXON | − | chr4: 105234743-105234763 | AUCUGCCCUGAGGUAUGCGA | 467 |
| 54790_4_1482 | TET2 | EXON | − | chr4: 105234753-105234773 | UGCGGAAUUGAUCUGCCCUG | 468 |
| 54790_4_1485 | TET2 | EXON | − | chr4: 105234771-105234791 | CUCAGAGUUAGAGGUCUGUG | 469 |
| 54790_4_1490 | TET2 | EXON | − | chr4: 105234780-105234800 | UGGAGGCAGCUCAGAGUUAG | 470 |
| 54790_4_1493 | TET2 | EXON | − | chr4: 105234797-105234817 | ACCACUGCAGCUGGCUUUGG | 471 |
| 54790_4_1495 | TET2 | EXON | − | chr4: 105234800-105234820 | CUCACCACUGCAGCUGGCUU | 472 |
| 54790_4_1497 | TET2 | EXON | − | chr4: 105234806-105234826 | GCCUCACUCACCACUGCAGC | 473 |
| 54790_4_1499 | TET2 | EXON | − | chr4: 105234828-105234848 | AUCAGCAUCAUCAGCAUCAC | 474 |
| 54790_4_1505 | TET2 | EXON | − | chr4: 105234855-105234875 | UAGCAUUGCAGCUAGUUUAC | 475 |
| 54790_4_1510 | TET2 | EXON | − | chr4: 105234882-105234902 | UUCUGGUUUCUGAAAGGAAC | 476 |
| 54790_4_1514 | TET2 | EXON | − | chr4: 105234888-105234908 | UAGUUGUUCUGGUUUCUGAA | 477 |
| 54790_4_1521 | TET2 | EXON | − | chr4: 105234899-105234919 | UUUUGUUGUUGUAGUUGUUC | 478 |
| 54790_4_1526 | TET2 | EXON | − | chr4: 105234940-105234960 | UGUUAUUUUCUGCAGGAGAU | 479 |
| 54790_4_1527 | TET2 | EXON | − | chr4: 105234941-105234961 | AUGUUAUUUUCUGCAGGAGA | 480 |
| 54790_4_1531 | TET2 | EXON | − | chr4: 105234947-105234967 | CCCUGGAUGUUAUUUUCUGC | 481 |
| 54790_4_1535 | TET2 | EXON | − | chr4: 105234964-105234984 | ACGCUAGCUUUGUGGUUCCC | 482 |
| 54790_4_1539 | TET2 | EXON | − | chr4: 105234972-105234992 | UUCACCAGACGCUAGCUUUG | 483 |
| 54790_4_1545 | TET2 | EXON | − | chr4: 105235011-105235031 | AGGAGCUUGCAAAUUGCUGC | 484 |
| 54790_4_1551 | TET2 | EXON | − | chr4: 105235031-105235051 | UACCGUUCAGAGCUGCCACC | 485 |
| 54790_4_1569 | TET2 | EXON | − | chr4: 105235116-105235136 | ACCACACCAUCACCCAGAAA | 486 |
| 54790_4_1577 | TET2 | EXON | − | chr4: 105235166-105235186 | ACCUGUGGAAGAGGAGGAGG | 487 |
| 54790_4_1579 | TET2 | EXON | − | chr4: 105235167-105235187 | AACCUGUGGAAGAGGAGGAG | 488 |
| 54790_4_1581 | TET2 | EXON | − | chr4: 105235168-105235188 | GAACCUGUGGAAGAGGAGGA | 489 |
| 54790_4_1582 | TET2 | EXON | − | chr4: 105235169-105235189 | GGAACCUGUGGAAGAGGAGG | 490 |
| 54790_4_1586 | TET2 | EXON | − | chr4: 105235172-105235192 | UGAGGAACCUGUGGAAGAGG | 491 |
| 54790_4_1588 | TET2 | EXON | − | chr4: 105235175-105235195 | AGCUGAGGAACCUGUGGAAG | 492 |
| 54790_4_1593 | TET2 | EXON | − | chr4: 105235181-105235201 | GAAGGAAGCUGAGGAACCUG | 493 |
| 54790_4_1600 | TET2 | EXON | − | chr4: 105235190-105235210 | UUUCCUUCUGAAGGAAGCUG | 494 |
| 54790_4_1606 | TET2 | EXON | − | chr4: 105235199-105235219 | AGAGUGCUUUUUCCUUCUGA | 495 |
| 54790_4_1617 | TET2 | EXON | − | chr4: 105235246-105235266 | UACUUUGGUUGGGGUAGUGG | 496 |
| 54790_4_1618 | TET2 | EXON | − | chr4: 105235249-105235269 | UGUUACUUUGGUUGGGGUAG | 497 |
| 54790_4_1620 | TET2 | EXON | − | chr4: 105235255-105235275 | GUGUUGUGUUACUUUGGUUG | 498 |
| 54790_4_1621 | TET2 | EXON | − | chr4: 105235256-105235276 | AGUGUUGUGUUACUUUGGUU | 499 |
| 54790_4_1623 | TET2 | EXON | − | chr4: 105235257-105235277 | AAGUGUUGUGUUACUUUGGU | 500 |
| 54790_4_1626 | TET2 | EXON | − | chr4: 105235261-105235281 | UUAAAAGUGUUGUGUUACUU | 501 |
| 54790_4_1633 | TET2 | EXON | − | chr4: 105235307-105235327 | CUCUGGGAAGGUGGUGCCUC | 502 |
| 54790_4_1634 | TET2 | EXON | − | chr4: 105235316-105235336 | GGAUUAGGACUCUGGGAAGG | 503 |
| 54790_4_1635 | TET2 | EXON | − | chr4: 105235319-105235339 | GAUGGAUUAGGACUCUGGGA | 504 |
| 54790_4_1636 | TET2 | EXON | − | chr4: 105235323-105235343 | UGUAGAUGGAUUAGGACUCU | 505 |
| 54790_4_1638 | TET2 | EXON | − | chr4: 105235324-105235344 | GUGUAGAUGGAUUAGGACUC | 506 |
| 54790_4_1641 | TET2 | EXON | − | chr4: 105235331-105235351 | CAUACAUGUGUAGAUGGAUU | 507 |
| 54790_4_1643 | TET2 | EXON | − | chr4: 105235337-105235357 | GGGCUGCAUACAUGUGUAGA | 508 |
| 54790_4_1647 | TET2 | EXON | − | chr4: 105235357-105235377 | UUUCAGAAAGCAUCGGAGAA | 509 |
| 54790_4_1648 | TET2 | EXON | − | chr4: 105235358-105235378 | CUUUCAGAAAGCAUCGGAGA | 510 |
| 54790_4_1653 | TET2 | EXON | − | chr4: 105235364-105235384 | UGAGGCCUUUCAGAAAGCAU | 511 |
| 54790_4_1660 | TET2 | EXON | − | chr4: 105235382-105235402 | CUGUUCACACAAUUAUUCUG | 512 |
| 54790_4_1668 | TET2 | EXON | − | chr4: 105235439-105235459 | CUUGUUUUCUCAGAACACAA | 513 |
| 54790_4_1676 | TET2 | EXON | − | chr4: 105235463-105235483 | UGCUUGAGGUGUUCUGACAU | 514 |
| 54790_4_1678 | TET2 | EXON | − | chr4: 105235477-105235497 | AAAUUGGUGGGUUAUGCUUG | 515 |
| 54790_4_1680 | TET2 | EXON | − | chr4: 105235489-105235509 | CACUGCUACCAAAAAUUGGU | 516 |
| 54790_4_1681 | TET2 | EXON | − | chr4: 105235490-105235510 | CCACUGCUACCAAAAAUUGG | 517 |
| 54790_4_1683 | TET2 | EXON | − | chr4: 105235493-105235513 | UCUCCACUGCUACCAAAAAU | 518 |
| 54790_4_1690 | TET2 | EXON | − | chr4: 105235531-105235551 | CUUUGUUUCUCAUCAACUGC | 519 |
| 54790_4_1699 | TET2 | EXON | − | chr4: 105235604-105235624 | UUCAGAUAGUGCUGUGUUGG | 520 |
| 54790_4_1700 | TET2 | EXON | − | chr4: 105235605-105235625 | UUUCAGAUAGUGCUGUGUUG | 521 |
| 54790_4_1702 | TET2 | EXON | − | chr4: 105235606-105235626 | GUUUCAGAUAGUGCUGUGUU | 522 |
| 54790_4_1703 | TET2 | EXON | − | chr4: 105235607-105235627 | GGUUUCAGAUAGUGCUGUGU | 523 |
| 54790_4_1708 | TET2 | EXON | − | chr4: 105235628-105235648 | GCCUUCAAUUCAAUCCAUCC | 524 |
| 54790_4_1711 | TET2 | EXON | − | chr4: 105235650-105235670 | UUCCGCUUGGUGAAAACGAG | 525 |
| 54790_4_1712 | TET2 | EXON | − | chr4: 105235651-105235671 | AUUCCGCUUGGUGAAAACGA | 526 |
| 54790_4_1713 | TET2 | EXON | − | chr4: 105235652-105235672 | GAUUCCGCUUGGUGAAAACG | 527 |
| 54790_4_1722 | TET2 | EXON | − | chr4: 105235663-105235683 | GUUUUAGAUGGGAUUCCGCU | 528 |
| 54790_4_1723 | TET2 | EXON | − | chr4: 105235674-105235694 | UGCCUCAUUACGUUUUAGAU | 529 |
| 54790_4_1724 | TET2 | EXON | − | chr4: 105235675-105235695 | AUGCCUCAUUACGUUUUAGA | 530 |
| 54790_4_1730 | TET2 | EXON | − | chr4: 105235703-105235723 | GGUUGAUACUGAAGAAUUGA | 531 |
| 54790_4_1737 | TET2 | EXON | − | chr4: 105235724-105235744 | GUCAUUUGAUUGGAGAGAUU | 532 |
| 54790_4_1738 | TET2 | EXON | − | chr4: 105235725-105235745 | GGUCAUUUGAUUGGAGAGAU | 533 |
| 54790_4_1743 | TET2 | EXON | − | chr4: 105235734-105235754 | UUGUUUGGAGGUCAUUUGAU | 534 |
| 54790_4_1749 | TET2 | EXON | − | chr4: 105235746-105235766 | AUUUCCAGUGUAUUGUUUGG | 535 |
| 54790_4_1751 | TET2 | EXON | − | chr4: 105235749-105235769 | GGAAUUUCCAGUGUAUUGUU | 536 |
| 54790_4_1756 | TET2 | EXON | − | chr4: 105235770-105235790 | UGGGAGCCCCCCAGGCAUGU | 537 |
| 54790_4_1758 | TET2 | EXON | − | chr4: 105235778-105235798 | GCUUGCCUUGGGAGCCCCCC | 538 |
| 54790_4_1763 | TET2 | EXON | − | chr4: 105235789-105235809 | UCUGGGUGUAAGCUUGCCUU | 539 |
| 54790_4_1766 | TET2 | EXON | − | chr4: 105235790-105235810 | UUCUGGGUGUAAGCUUGCCU | 540 |
| 54790_4_1769 | TET2 | EXON | − | chr4: 105235806-105235826 | CUCCAGCUGUGUUGUUUUCU | 541 |
| 54790_4_1770 | TET2 | EXON | − | chr4: 105235807-105235827 | GCUCCAGCUGUGUUGUUUUC | 542 |
| 54790_4_1779 | TET2 | EXON | − | chr4: 105235846-105235866 | GCCCUUGAUUCAUUUCAACU | 543 |
| 54790_4_1782 | TET2 | EXON | − | chr4: 105235872-105235892 | AUGUUGGUCCACUGUACCUU | 544 |
| 54790_4_1783 | TET2 | EXON | − | chr4: 105235873-105235893 | GAUGUUGGUCCACUGUACCU | 545 |
| 54790_4_1790 | TET2 | EXON | − | chr4: 105235888-105235908 | GUUUUUGGAACUGGAGAUGU | 546 |
| 54790_4_1791 | TET2 | EXON | − | chr4: 105235897-105235917 | GGUGUGAGGGUUUUUGGAAC | 547 |
| 54790_4_1795 | TET2 | EXON | − | chr4: 105235903-105235923 | GCACCUGGUGUGAGGGUUUU | 548 |
| 54790_4_1800 | TET2 | EXON | − | chr4: 105235910-105235930 | GAGAAGUGCACCUGGUGUGA | 549 |
| 54790_4_1801 | TET2 | EXON | − | chr4: 105235911-105235931 | GGAGAAGUGCACCUGGUGUG | 550 |
| 54790_4_1804 | TET2 | EXON | − | chr4: 105235918-105235938 | CUGUUUUGGAGAAGUGCACC | 551 |
| 54790_4_1811 | TET2 | EXON | − | chr4: 105235932-105235952 | UUUUGGUAAAUGGUCUGUUU | 552 |
| 54790_4_1813 | TET2 | EXON | − | chr4: 105235942-105235962 | GCACAUGAGCUUUUGGUAAA | 553 |
| 54790_4_1814 | TET2 | EXON | − | chr4: 105235949-105235969 | AGUGACUGCACAUGAGCUUU | 554 |
| 54790_4_1828 | TET2 | EXON | − | chr4: 105236010-105236030 | GGACAUAAGUUUUUCAGUUU | 555 |
| 54790_4_1829 | TET2 | EXON | − | chr4: 105236011-105236031 | GGGACAUAAGUUUUUCAGUU | 556 |
| 54790_4_1836 | TET2 | EXON | − | chr4: 105236031-105236051 | CAAGUGCUGUUUCAACACUG | 557 |
| 54790_4_1838 | TET2 | EXON | − | chr4: 105236032-105236052 | UCAAGUGCUGUUUCAACACU | 558 |
| 54790_4_1839 | TET2 | EXON | − | chr4: 105236033-105236053 | UUCAAGUGCUGUUUCAACAC | 559 |
| 54790_4_1846 | TET2 | EXON | − | chr4: 105236078-105236098 | AAAAGGUGUGAGUUUGAAAA | 560 |
| 54790_4_1852 | TET2 | EXON | − | chr4: 105236095-105236115 | UAUGAGGCUUAUGUUGCAAA | 561 |
| 54790_4_1856 | TET2 | EXON | − | chr4: 105236111-105236131 | GUUUGUGCUGCCUGUUUAUG | 562 |
| 54790_4_1861 | TET2 | EXON | − | chr4: 105236138-105236158 | GGGAGAUGUGAACUCUGGGA | 563 |
| 54790_4_1862 | TET2 | EXON | − | chr4: 105236142-105236162 | UUGAGGGAGAUGUGAACUCU | 564 |
| 54790_4_1864 | TET2 | EXON | − | chr4: 105236143-105236163 | UUUGAGGGAGAUGUGAACUC | 565 |
| 54790_4_1873 | TET2 | EXON | − | chr4: 105236158-105236178 | GCUGCUGUUGCUGGUUUUGA | 566 |
| 54790_4_1875 | TET2 | EXON | − | chr4: 105236159-105236179 | UGCUGCUGUUGCUGGUUUUG | 567 |
| 54790_4_1880 | TET2 | EXON | − | chr4: 105236167-105236187 | GUAAUUUUUGCUGCUGUUGC | 568 |
| 54790_4_1892 | TET2 | EXON | − | chr4: 105236215-105236235 | UUUGGGGGUGAGGAAAAGUC | 569 |
| 54790_4_1896 | TET2 | EXON | − | chr4: 105236225-105236245 | UCAUUGUUGCUUUGGGGGUG | 570 |
| 54790_4_1901 | TET2 | EXON | − | chr4: 105236230-105236250 | GCUGAUCAUUGUUGCUUUGG | 571 |
| 54790_4_1902 | TET2 | EXON | − | chr4: 105236231-105236251 | UGCUGAUCAUUGUUGCUUUG | 572 |
| 54790_4_1904 | TET2 | EXON | − | chr4: 105236232-105236252 | UUGCUGAUCAUUGUUGCUUU | 573 |
| 54790_4_1906 | TET2 | EXON | − | chr4: 105236233-105236253 | UUUGCUGAUCAUUGUUGCUU | 574 |
| 54790_4_1914 | TET2 | EXON | − | chr4: 105236275-105236295 | AACAUUCUUCCACUUUAGUC | 575 |
| 54790_4_1931 | TET2 | EXON | − | chr4: 105236350-105236370 | GUACUUCCUCCAGUCCCAUU | 576 |
| 54790_4_1941 | TET2 | EXON | − | chr4: 105236394-105236414 | UUUCAUGGUCUGACUAUAAG | 577 |
| 54790_4_1943 | TET2 | EXON | − | chr4: 105236395-105236415 | AUUUCAUGGUCUGACUAUAA | 578 |
| 54790_4_1944 | TET2 | EXON | − | chr4: 105236396-105236416 | GAUUUCAUGGUCUGACUAUA | 579 |
| 54790_4_1950 | TET2 | EXON | − | chr4: 105236409-105236429 | UUUGCAUGCACUUGAUUUCA | 580 |
| 54790_4_1960 | TET2 | EXON | − | chr4: 105236461-105236481 | GUUCUUUAUUCUCUGAAACU | 581 |
| 54790_4_1966 | TET2 | EXON | − | chr4: 105236495-105236515 | UUGUUUCCUGCAAAAAGUUC | 582 |
| 54790_4_1972 | TET2 | EXON | − | chr4: 105236520-105236540 | UUGCAUGUGAUGCAAGUUUU | 583 |
| 54790_4_1973 | TET2 | EXON | − | chr4: 105236521-105236541 | AUUGCAUGUGAUGCAAGUUU | 584 |
| 54790_4_1982 | TET2 | EXON | − | chr4: 105236549-105236569 | UGCUUUGGGAUCACAUUAUU | 585 |
| 54790_4_1984 | TET2 | EXON | − | chr4: 105236563-105236583 | UGUGAAGAAGAUCUUGCUUU | 586 |
| 54790_4_1985 | TET2 | EXON | − | chr4: 105236564-105236584 | CUGUGAAGAAGAUCUUGCUU | 587 |
| 54790_4_2009 | TET2 | EXON | − | chr4: 105236653-105236673 | CUUGUUGACCAGACAUAUCU | 588 |
| 54790_4_2017 | TET2 | EXON | − | chr4: 105236713-105236733 | GCACAGGAAAAACAUUUGCA | 589 |
| 54790_4_2019 | TET2 | EXON | − | chr4: 105236729-105236749 | CUUCCUCCCUGGUCAGGCAC | 590 |
| 54790_4_2022 | TET2 | EXON | − | chr4: 105236735-105236755 | GUGUGACUUCCUCCCUGGUC | 591 |
| 54790_4_2023 | TET2 | EXON | − | chr4: 105236740-105236760 | UCUGAGUGUGACUUCCUCCC | 592 |
| 54790_4_2029 | TET2 | EXON | − | chr4: 105236763-105236783 | UUGAGUGUCCUUCUGGGGAG | 593 |
| 54790_4_2030 | TET2 | EXON | − | chr4: 105236764-105236784 | UUUGAGUGUCCUUCUGGGGA | 594 |
| 54790_4_2031 | TET2 | EXON | − | chr4: 105236765-105236785 | UUUUGAGUGUCCUUCUGGGG | 595 |
| 54790_4_2034 | TET2 | EXON | − | chr4: 105236768-105236788 | UGCUUUUGAGUGUCCUUCUG | 596 |
| 54790_4_2037 | TET2 | EXON | − | chr4: 105236769-105236789 | AUGCUUUUGAGUGUCCUUCU | 597 |
| 54790_4_2039 | TET2 | EXON | − | chr4: 105236770-105236790 | CAUGCUUUUGAGUGUCCUUC | 598 |
| 54790_4_2053 | TET2 | EXON | − | chr4: 105236846-105236866 | CUAUGGCAAGACUCAGUUUG | 599 |
| 54790_4_2054 | TET2 | EXON | − | chr4: 105236847-105236867 | ACUAUGGCAAGACUCAGUUU | 600 |
| 54790_4_2055 | TET2 | EXON | − | chr4: 105236848-105236868 | GACUAUGGCAAGACUCAGUU | 601 |
| 54790_4_2060 | TET2 | EXON | − | chr4: 105236863-105236883 | UUGGCCUGUGCAUCUGACUA | 602 |
| 54790_4_2063 | TET2 | EXON | − | chr4: 105236882-105236902 | CAUCCAGGUUCCACCUUAAU | 603 |
| 54790_4_2064 | TET2 | EXON | − | chr4: 105236897-105236917 | CAGGCAUGUGGCUUGCAUCC | 604 |
| 54790_4_2065 | TET2 | EXON | − | chr4: 105236909-105236929 | GCUGUGUGCAUACAGGCAUG | 605 |
| 54790_4_2069 | TET2 | EXON | − | chr4: 105236916-105236936 | UGGUGGUGCUGUGUGCAUAC | 606 |
| 54790_4_2077 | TET2 | EXON | − | chr4: 105236933-105236953 | UUCCAUGUUUUGUUUUCUGG | 607 |
| 54790_4_2079 | TET2 | EXON | − | chr4: 105236936-105236956 | UUUUUCCAUGUUUUGUUUUC | 608 |
| 54790_4_2085 | TET2 | EXON | − | chr4: 105236978-105236998 | ACAUUAUCACAGCUUGCAGG | 609 |
| 54790_4_2089 | TET2 | EXON | − | chr4: 105236981-105237001 | UGCACAUUAUCACAGCUUGC | 610 |
| 54790_4_2092 | TET2 | EXON | − | chr4: 105237024-105237044 | CUGCUUCAGAUGCUGCUCCA | 611 |
| 54790_4_2096 | TET2 | EXON | − | chr4: 105237054-105237074 | CUUAUGGUCAAAUAACGACU | 612 |
| 54790_4_2099 | TET2 | EXON | − | chr4: 105237070-105237090 | AUUUGAGAGUAAGAGCCUUA | 613 |
| 54790_4_2112 | TET2 | EXON | − | chr4: 105237125-105237145 | UGUCUAGUCAAAACUGUGAC | 614 |
| 54790_4_2114 | TET2 | EXON | − | chr4: 105237150-105237170 | GCUAUCAAGUUCUGCAGCAG | 615 |
| 54790_4_2118 | TET2 | EXON | − | chr4: 105237172-105237192 | GCUGCUCUAAAGCUGGGGUG | 616 |
| 54790_4_2119 | TET2 | EXON | − | chr4: 105237177-105237197 | UGUUUGCUGCUCUAAAGCUG | 617 |
| 54790_4_2120 | TET2 | EXON | − | chr4: 105237178-105237198 | UUGUUUGCUGCUCUAAAGCU | 618 |
| 54790_4_2122 | TET2 | EXON | − | chr4: 105237179-105237199 | GUUGUUUGCUGCUCUAAAGC | 619 |
| 54790_4_2135 | TET2 | EXON | − | chr4: 105237218-105237238 | GAAGCAGCUGUUCUUUUGGU | 620 |
| 54790_4_2137 | TET2 | EXON | − | chr4: 105237222-105237242 | AACAGAAGCAGCUGUUCUUU | 621 |
| 54790_4_2148 | TET2 | EXON | − | chr4: 105237266-105237286 | GGAGUAUCUAGUAAUUUGGA | 622 |
| 54790_4_2153 | TET2 | EXON | − | chr4: 105237270-105237290 | UAUAGGAGUAUCUAGUAAUU | 623 |
| 54790_4_2156 | TET2 | EXON | − | chr4: 105237287-105237307 | GUAUCCAAUAAAUUUUUUAU | 624 |
| 54790_4_2160 | TET2 | EXON | − | chr4: 105237311-105237331 | AAAUCAUAUUGAGUCUUGAC | 625 |
| 54790_4_2163 | TET2 | EXON | − | chr4: 105237334-105237354 | UACCUACACAUCUGCAAGAU | 626 |
| 54790_4_2165 | TET2 | EXON | − | chr4: 105237335-105237355 | UUACCUACACAUCUGCAAGA | 627 |
| 54790_4_2170 | TET2 | EXON | − | chr4: 105237361-105237381 | CAUGUGUCUCAGUACAUUUC | 628 |
| 54790_4_2174 | TET2 | EXON | − | chr4: 105237392-105237412 | GAAGAUAAAUUUGCUAAUUC | 629 |
| 54790_4_2180 | TET2 | EXON | − | chr4: 105237429-105237449 | ACUCAAGAUUUAAAAAAAGA | 630 |
| 54790_4_2197 | TET2 | EXON | − | chr4: 105237510-105237530 | CUUUCACAAGACACAAGCAU | 631 |
| 54790_4_2206 | TET2 | EXON | − | chr4: 105237558-105237578 | GCACGAUUAUUUAAUUCUUU | 632 |
| 54790_4_2213 | TET2 | EXON | − | chr4: 105237593-105237613 | UUUUACAGGAUCUGAAGAGA | 633 |
| 54790_4_2215 | TET2 | EXON | − | chr4: 105237594-105237614 | AUUUUACAGGAUCUGAAGAG | 634 |
| 54790_4_2221 | TET2 | EXON | − | chr4: 105237607-105237627 | CAGAUACAUUCAAAUUUUAC | 635 |
| 54790_4_2225 | TET2 | EXON | − | chr4: 105237645-105237665 | UAAUAUACAAAGAGCUAAAU | 636 |
| 54790_4_2233 | TET2 | EXON | − | chr4: 105237671-105237691 | UGCUGCCUAGCUGUCUCUCC | 637 |
| 54790_4_2247 | TET2 | EXON | − | chr4: 105237727-105237747 | UUCGUACAUUAGACUGCCUA | 638 |
| 54790_4_2270 | TET2 | EXON | − | chr4: 105237874-105237894 | AAUGGAGAAAAGGAAACUUU | 639 |
| 54790_4_2274 | TET2 | EXON | − | chr4: 105237884-105237904 | CAAAUGUAUAAAUGGAGAAA | 640 |
| 54790_4_2277 | TET2 | EXON | − | chr4: 105237892-105237912 | CAACAUUCCAAAUGUAUAAA | 641 |
| 54790_4_2284 | TET2 | EXON | − | chr4: 105237936-105237956 | AGAUGAAAUUUUAGAGAAAA | 642 |
| 54790_4_2287 | TET2 | EXON | − | chr4: 105237937-105237957 | AAGAUGAAAUUUUAGAGAAA | 643 |
| 54790_4_2323 | TET2 | EXON | − | chr4: 105240511-105240531 | AGGGAAAACAUGGCACGGGU | 644 |
| 54790_4_2325 | TET2 | EXON | − | chr4: 105240515-105240535 | CAAGAGGGAAAACAUGGCAC | 645 |
| 54790_4_2326 | TET2 | EXON | − | chr4: 105240516-105240536 | GCAAGAGGGAAAACAUGGCA | 646 |
| 54790_4_2328 | TET2 | EXON | − | chr4: 105240521-105240541 | UCAUUGCAAGAGGGAAAACA | 647 |
| 54790_4_2330 | TET2 | EXON | − | chr4: 105240530-105240550 | UGGGGUAUCUCAUUGCAAGA | 648 |
| 54790_4_2331 | TET2 | EXON | − | chr4: 105240531-105240551 | GUGGGGUAUCUCAUUGCAAG | 649 |
| 54790_4_2336 | TET2 | EXON | − | chr4: 105240548-105240568 | CCAUCCUUCUACACAGUGUG | 650 |
| 54790_4_2337 | TET2 | EXON | − | chr4: 105240549-105240569 | UCCAUCCUUCUACACAGUGU | 651 |
| 54790_4_2338 | TET2 | EXON | − | chr4: 105240550-105240570 | CUCCAUCCUUCUACACAGUG | 652 |
| 54790_4_2342 | TET2 | EXON | − | chr4: 105240581-105240601 | CACACGCAAAGAGGGACAGU | 653 |
| 54790_4_2345 | TET2 | EXON | − | chr4: 105240589-105240609 | UUAAUAACCACACGCAAAGA | 654 |
| 54790_4_2347 | TET2 | EXON | − | chr4: 105240590-105240610 | CUUAAUAACCACACGCAAAG | 655 |
| 54790_4_2353 | TET2 | EXON | − | chr4: 105240616-105240636 | UGUGGUGUUUUAGCCCAGUG | 656 |
| 54790_4_2357 | TET2 | EXON | − | chr4: 105240634-105240654 | AAUAUUAUCUAUGAGAUGUG | 657 |
| 54790_4_2365 | TET2 | EXON | − | chr4: 105240693-105240713 | AAAAGUGGGAAGAUAGGGGU | 658 |
| 54790_4_2366 | TET2 | EXON | − | chr4: 105240694-105240714 | GAAAAGUGGGAAGAUAGGGG | 659 |
| 54790_4_2368 | TET2 | EXON | − | chr4: 105240697-105240717 | AUGGAAAAGUGGGAAGAUAG | 660 |
| 54790_4_2369 | TET2 | EXON | − | chr4: 105240698-105240718 | GAUGGAAAAGUGGGAAGAUA | 661 |
| 54790_4_2370 | TET2 | EXON | − | chr4: 105240699-105240719 | AGAUGGAAAAGUGGGAAGAU | 662 |
| 54790_4_2373 | TET2 | EXON | − | chr4: 105240707-105240727 | ACCAACAAAGAUGGAAAAGU | 663 |
| 54790_4_2377 | TET2 | EXON | − | chr4: 105240708-105240728 | AACCAACAAAGAUGGAAAAG | 664 |
| 54790_4_2380 | TET2 | EXON | − | chr4: 105240716-105240736 | CUGUUGCAAACCAACAAAGA | 665 |
| 54790_4_2382 | TET2 | EXON | − | chr4: 105240739-105240759 | GAGAGUCAGGCAAAAAGAAG | 666 |
| 54790_4_2383 | TET2 | EXON | − | chr4: 105240740-105240760 | GGAGAGUCAGGCAAAAAGAA | 667 |
| 54790_4_2384 | TET2 | EXON | − | chr4: 105240741-105240761 | UGGAGAGUCAGGCAAAAAGA | 668 |
| 54790_4_2389 | TET2 | EXON | − | chr4: 105240752-105240772 | AGAGAAAAUCCUGGAGAGUC | 669 |
| 54790_4_2393 | TET2 | EXON | − | chr4: 105240761-105240781 | UUUAUGAUGAGAGAAAAUCC | 670 |
| 54790_4_2422 | TET2 | EXON | − | chr4: 105240882-105240902 | UAUUGCUUGGUUUAUUGUCA | 671 |
| 54790_4_2424 | TET2 | EXON | − | chr4: 105240895-105240915 | CCCACCCCCAGAAUAUUGCU | 672 |
| 54790_4_2434 | TET2 | EXON | − | chr4: 105240954-105240974 | CUGGAAGCCUACCUAUUACU | 673 |
| 54790_4_2439 | TET2 | EXON | − | chr4: 105240973-105240993 | AAAAAACAUUUAAAGCUAAC | 674 |
| 54790_4_2446 | TET2 | EXON | − | chr4: 105241000-105241020 | UACAAUCCAAUUUUUUGAGC | 675 |
| 54790_4_2454 | TET2 | EXON | − | chr4: 105241052-105241072 | CUAAACAAAGAAUACAGUGA | 676 |
| 54790_4_2456 | TET2 | EXON | − | chr4: 105241053-105241073 | ACUAAACAAAGAAUACAGUG | 677 |
| 54790_4_2468 | TET2 | EXON | − | chr4: 105241107-105241127 | AUAUAUUACAUUUCAGAUAU | 678 |
| 54790_4_2469 | TET2 | EXON | − | chr4: 105241108-105241128 | AAUAUAUUACAUUUCAGAUA | 679 |
| 54790_4_2475 | TET2 | EXON | − | chr4: 105241136-105241156 | UAUAUGUACAUGCUGGUUGU | 680 |
| 54790_4_2477 | TET2 | EXON | − | chr4: 105241143-105241163 | AAUUAAGUAUAUGUACAUGC | 681 |
| 54790_4_2488 | TET2 | EXON | − | chr4: 105241193-105241213 | CUUUAAAAUGAGUAGAUUGA | 682 |
| 54790_4_2498 | TET2 | EXON | − | chr4: 105241245-105241265 | AACCCCCAACUACACAUUAA | 683 |
| 54790_4_2499 | TET2 | EXON | − | chr4: 105241246-105241266 | UAACCCCCAACUACACAUUA | 684 |
| 54790_4_2503 | TET2 | EXON | − | chr4: 105241285-105241305 | CUCAAUUAUACUAAAUAUAA | 685 |
| 54790_4_2519 | TET2 | EXON | − | chr4: 105241367-105241387 | GCUCCUAGAUGGGUAUAAAA | 686 |
| 54790_4_2522 | TET2 | EXON | − | chr4: 105241377-105241397 | AUUAGGACCUGCUCCUAGAU | 687 |
| 54790_4_2523 | TET2 | EXON | − | chr4: 105241378-105241398 | CAUUAGGACCUGCUCCUAGA | 688 |
| 54790_4_2527 | TET2 | EXON | − | chr4: 105241394-105241414 | UCUCUAAUAGCUGCCACAUU | 689 |
| 54790_4_2538 | TET2 | EXON | − | chr4: 105241470-105241490 | AAAAUUCUGACAUAUACAAA | 690 |
| 54790_4_2546 | TET2 | EXON | − | chr4: 105241494-105241514 | ACUGCUUUGUGUGUGAAGGC | 691 |
| 54790_4_2548 | TET2 | EXON | − | chr4: 105241498-105241518 | GUUUACUGCUUUGUGUGUGA | 692 |
| 54790_4_2555 | TET2 | EXON | − | chr4: 105241568-105241588 | AAUAGCACAGUGUGUAGUGU | 693 |
| 54790_4_2558 | TET2 | EXON | − | chr4: 105241593-105241613 | UGUCAAAUAUUGUGACUCUC | 694 |
| 54790_4_2563 | TET2 | EXON | − | chr4: 105241647-105241667 | UCUGGCAUCCAUCGCAAAGU | 695 |
| 54790_4_2564 | TET2 | EXON | − | chr4: 105241648-105241668 | UUCUGGCAUCCAUCGCAAAG | 696 |
| 54790_4_2568 | TET2 | EXON | − | chr4: 105241665-105241685 | CUGUUCAUGCCUGGGUUUUC | 697 |
| 54790_4_2569 | TET2 | EXON | − | chr4: 105241673-105241693 | GCCGAUUCCUGUUCAUGCCU | 698 |
| 54790_4_2570 | TET2 | EXON | − | chr4: 105241674-105241694 | GGCCGAUUCCUGUUCAUGCC | 699 |
| 54790_4_2573 | TET2 | EXON | − | chr4: 105241695-105241715 | CUUGUGGCUGGCAGCCUGGC | 700 |
| 54790_4_2574 | TET2 | EXON | − | chr4: 105241699-105241719 | GUACCUUGUGGCUGGCAGCC | 701 |
| 54790_4_2575 | TET2 | EXON | − | chr4: 105241707-105241727 | CUGUGCCAGUACCUUGUGGC | 702 |
| 54790_4_2577 | TET2 | EXON | − | chr4: 105241711-105241731 | GAGCCUGUGCCAGUACCUUG | 703 |
| 54790_4_2578 | TET2 | EXON | − | chr4: 105241733-105241753 | GCCAGAGUGGGACCUCUCGU | 704 |
| 54790_4_2582 | TET2 | EXON | − | chr4: 105241745-105241765 | UCAGGUGGGAAAGCCAGAGU | 705 |
| 54790_4_2585 | TET2 | EXON | − | chr4: 105241746-105241766 | AUCAGGUGGGAAAGCCAGAG | 706 |
| 54790_4_2591 | TET2 | EXON | − | chr4: 105241759-105241779 | UUGACACUUUAUUAUCAGGU | 707 |
| 54790_4_2595 | TET2 | EXON | − | chr4: 105241760-105241780 | UUUGACACUUUAUUAUCAGG | 708 |
| 54790_4_2598 | TET2 | EXON | − | chr4: 105241763-105241783 | UGCUUUGACACUUUAUUAUC | 709 |
| 54790_4_2609 | TET2 | EXON | − | chr4: 105241819-105241839 | ACUAGGUGAAUUUAAUUCAG | 710 |
| 54790_4_2613 | TET2 | EXON | − | chr4: 105241836-105241856 | AAGUACUCAUUUGCAACACU | 711 |
| 54790_4_2622 | TET2 | EXON | − | chr4: 105241878-105241898 | UCACACUUGCUCUCUUUUUA | 712 |
| 54790_4_2629 | TET2 | EXON | − | chr4: 105241939-105241959 | AUAGCGAAAAAAAAAAAAAA | 713 |
| 54790_4_2633 | TET2 | EXON | − | chr4: 105241986-105242006 | UCUUCUACAUGCAGGAGUAA | 714 |
| 54790_4_2635 | TET2 | EXON | − | chr4: 105241994-105242014 | CAUAAGAGUCUUCUACAUGC | 715 |
| 54790_4_2642 | TET2 | EXON | − | chr4: 105242038-105242058 | GCUGUAUAAAUUUAUAUGAA | 716 |
| 54790_4_2652 | TET2 | EXON | − | chr4: 105242086-105242106 | CUGCCUACCUCUUAAUGAAA | 717 |
| 54790_4_2663 | TET2 | EXON | − | chr4: 105242173-105242193 | AGAAAUGAAUAAUUUGGAAA | 718 |
| 54790_4_2665 | TET2 | EXON | − | chr4: 105242179-105242199 | UAAUUUAGAAAUGAAUAAUU | 719 |
| 54790_4_2679 | TET2 | EXON | − | chr4: 105242236-105242256 | GGAAAUUCACUAUUUCUGCC | 720 |
| 54790_4_2681 | TET2 | EXON | − | chr4: 105242257-105242277 | GUUGUUUUUUUUGGCACUUA | 721 |
| 54790_4_2683 | TET2 | EXON | − | chr4: 105242258-105242278 | UGUUGUUUUUUUUGGCACUU | 722 |
| 54790_4_2685 | TET2 | EXON | − | chr4: 105242266-105242286 | UGUUUUUUUGUUGUUUUUUU | 723 |
| 54790_4_2694 | TET2 | EXON | − | chr4: 105242360-105242380 | AUCCAGCCACAUGGAAAAUA | 724 |
| 54790_4_2697 | TET2 | EXON | − | chr4: 105242369-105242389 | AUAGUUAGUAUCCAGCCACA | 725 |
| 54790_4_2701 | TET2 | EXON | − | chr4: 105242395-105242415 | CACAAUUUAGAAAAGGAGGC | 726 |
| 54790_4_2702 | TET2 | EXON | − | chr4: 105242399-105242419 | GUCUCACAAUUUAGAAAAGG | 727 |
| 54790_4_2703 | TET2 | EXON | − | chr4: 105242402-105242422 | AAUGUCUCACAAUUUAGAAA | 728 |
| 54790_4_2721 | TET2 | EXON | − | chr4: 105242462-105242482 | UUUAGCUAUUUUAAAACUUG | 729 |
| 54790_4_2723 | TET2 | EXON | − | chr4: 105242463-105242483 | AUUUAGCUAUUUUAAAACUU | 730 |
| 54790_4_2726 | TET2 | EXON | − | chr4: 105242464-105242484 | AAUUUAGCUAUUUUAAAACU | 731 |
| 54790_4_2742 | TET2 | EXON | − | chr4: 105242539-105242559 | UUUCACAAAGCACAAAAUUC | 732 |
| 54790_4_2749 | TET2 | EXON | − | chr4: 105242583-105242603 | AAUUACAUGUGGGUGAAAAU | 733 |
| 54790_4_2752 | TET2 | EXON | − | chr4: 105242584-105242604 | AAAUUACAUGUGGGUGAAAA | 734 |
| 54790_4_2755 | TET2 | EXON | − | chr4: 105242593-105242613 | CUAUUUUGUAAAUUACAUGU | 735 |
| 54790_4_2756 | TET2 | EXON | − | chr4: 105242594-105242614 | ACUAUUUUGUAAAUUACAUG | 736 |
| 54790_4_2769 | TET2 | EXON | − | chr4: 105242669-105242689 | ACGCCAAGCAAACUGGAUAA | 737 |
| 54790_4_2772 | TET2 | EXON | − | chr4: 105242676-105242696 | CAGGUCUACGCCAAGCAAAC | 738 |
| 54790_4_2780 | TET2 | EXON | − | chr4: 105242695-105242715 | CGGUUUAUUAUUUUUUAAAC | 739 |
| 54790_4_2781 | TET2 | EXON | − | chr4: 105242715-105242735 | ACCACAUCCUGAGAAAUGAA | 740 |
| 54790_5_3 | TET2 | EXON | + | chr4: 105242816-105242836 | CUGUGGGUUUCUUUAAGGUU | 741 |
| 54790_5_7 | TET2 | EXON | + | chr4: 105242824-105242844 | UUCUUUAAGGUUUGGACAGA | 742 |
| 54790_5_8 | TET2 | EXON | + | chr4: 105242825-105242845 | UCUUUAAGGUUUGGACAGAA | 743 |
| 54790_5_15 | TET2 | EXON | + | chr4: 105242838-105242858 | GACAGAAGGGUAAAGCUAUU | 744 |
| 54790_5_20 | TET2 | EXON | + | chr4: 105242861-105242881 | AUUGAAAGAGUCAUCUAUAC | 745 |
| 54790_5_23 | TET2 | EXON | + | chr4: 105242870-105242890 | GUCAUCUAUACUGGUAAAGA | 746 |
| 54790_5_26 | TET2 | EXON | + | chr4: 105242884-105242904 | UAAAGAAGGCAAAAGUUCUC | 747 |
| 54790_5_27 | TET2 | EXON | + | chr4: 105242885-105242905 | AAAGAAGGCAAAAGUUCUCA | 748 |
| 54790_5_30 | TET2 | EXON | + | chr4: 105242904-105242924 | AGGGAUGUCCUAUUGCUAAG | 749 |
| 54790_5_31 | TET2 | EXON | + | chr4: 105242905-105242925 | GGGAUGUCCUAUUGCUAAGU | 750 |
| 54790_5_51 | TET2 | EXON | − | chr4: 105242915-105242935 | ACACUUACCCACUUAGCAAU | 751 |
| 54790_6_1 | TET2 | EXON | + | chr4: 105243550-105243570 | GGAAUGGUGAUCCACGCAGG | 752 |
| 54790_6_7 | TET2 | EXON | + | chr4: 105243589-105243609 | UGAAGAGAAGCUACUGUGUU | 753 |
| 54790_6_9 | TET2 | EXON | + | chr4: 105243594-105243614 | AGAAGCUACUGUGUUUGGUG | 754 |
| 54790_6_12 | TET2 | EXON | + | chr4: 105243595-105243615 | GAAGCUACUGUGUUUGGUGC | 755 |
| 54790_6_14 | TET2 | EXON | + | chr4: 105243605-105243625 | UGUUUGGUGCGGGAGCGAGC | 756 |
| 54790_6_18 | TET2 | EXON | + | chr4: 105243619-105243639 | GCGAGCUGGCCACACCUGUG | 757 |
| 54790_6_19 | TET2 | EXON | + | chr4: 105243646-105243666 | AGUGAUUGUGAUUCUCAUCC | 758 |
| 54790_6_21 | TET2 | EXON | + | chr4: 105243651-105243671 | UUGUGAUUCUCAUCCUGGUG | 759 |
| 54790_6_24 | TET2 | EXON | + | chr4: 105243652-105243672 | UGUGAUUCUCAUCCUGGUGU | 760 |
| 54790_6_27 | TET2 | EXON | + | chr4: 105243656-105243676 | AUUCUCAUCCUGGUGUGGGA | 761 |
| 54790_6_30 | TET2 | EXON | + | chr4: 105243673-105243693 | GGAAGGAAUCCCGCUGUCUC | 762 |
| 54790_6_32 | TET2 | EXON | + | chr4: 105243691-105243711 | UCUGGCUGACAAACUCUACU | 763 |
| 54790_6_37 | TET2 | EXON | + | chr4: 105243711-105243731 | CGGAGCUUACCGAGACGCUG | 764 |
| 54790_6_39 | TET2 | EXON | + | chr4: 105243719-105243739 | ACCGAGACGCUGAGGAAAUA | 765 |
| 54790_6_41 | TET2 | EXON | + | chr4: 105243738-105243758 | ACGGCACGCUCACCAAUCGC | 766 |
| 54790_6_48 | TET2 | EXON | + | chr4: 105243771-105243791 | AUGAAGAGUAAGUGAAGCCC | 767 |
| 54790_6_49 | TET2 | EXON | + | chr4: 105243772-105243792 | UGAAGAGUAAGUGAAGCCCA | 768 |
| 54790_6_51 | TET2 | EXON | − | chr4: 105243564-105243584 | GCUUCUGCGAACCACCUGCG | 769 |
| 54790_6_56 | TET2 | EXON | − | chr4: 105243631-105243651 | UCACUGCAGCCUCACAGGUG | 770 |
| 54790_6_57 | TET2 | EXON | − | chr4: 105243636-105243656 | CACAAUCACUGCAGCCUCAC | 771 |
| 54790_6_62 | TET2 | EXON | − | chr4: 105243667-105243687 | GCGGGAUUCCUUCCCACACC | 772 |
| 54790_6_66 | TET2 | EXON | − | chr4: 105243685-105243705 | GUUUGUCAGCCAGAGACAGC | 773 |
| 54790_6_67 | TET2 | EXON | − | chr4: 105243686-105243706 | AGUUUGUCAGCCAGAGACAG | 774 |
| 54790_6_75 | TET2 | EXON | − | chr4: 105243723-105243743 | GCCGUAUUUCCUCAGCGUCU | 775 |
| 54790_6_80 | TET2 | EXON | − | chr4: 105243753-105243773 | AUUCAAGGCACACCGGCGAU | 776 |
| 54790_6_82 | TET2 | EXON | − | chr4: 105243760-105243780 | ACUCUUCAUUCAAGGCACAC | 777 |
| 54790_6_84 | TET2 | EXON | − | chr4: 105243768-105243788 | CUUCACUUACUCUUCAUUCA | 778 |
| 54790_7_10 | TET2 | EXON | + | chr4: 105259615-105259635 | CAGGAGAACUUGCGCCUGUC | 779 |
| 54790_7_12 | TET2 | EXON | + | chr4: 105259616-105259636 | AGGAGAACUUGCGCCUGUCA | 780 |
| 54790_7_14 | TET2 | EXON | + | chr4: 105259617-105259637 | GGAGAACUUGCGCCUGUCAG | 781 |
| 54790_7_16 | TET2 | EXON | + | chr4: 105259621-105259641 | AACUUGCGCCUGUCAGGGGC | 782 |
| 54790_7_20 | TET2 | EXON | + | chr4: 105259637-105259657 | GGGCUGGAUCCAGAAACCUG | 783 |
| 54790_7_21 | TET2 | EXON | + | chr4: 105259655-105259675 | UGUGGUGCCUCCUUCUCUUU | 784 |
| 54790_7_23 | TET2 | EXON | + | chr4: 105259665-105259685 | CCUUCUCUUUUGGUUGUUCA | 785 |
| 54790_7_31 | TET2 | EXON | + | chr4: 105259682-105259702 | UCAUGGAGCAUGUACUACAA | 786 |
| 54790_7_35 | TET2 | EXON | + | chr4: 105259713-105259733 | UUGCCAGAAGCAAGAUCCCA | 787 |
| 54790_7_41 | TET2 | EXON | + | chr4: 105259730-105259750 | CCAAGGAAGUUUAAGCUGCU | 788 |
| 54790_7_42 | TET2 | EXON | + | chr4: 105259731-105259751 | CAAGGAAGUUUAAGCUGCUU | 789 |
| 54790_7_44 | TET2 | EXON | + | chr4: 105259732-105259752 | AAGGAAGUUUAAGCUGCUUG | 790 |
| 54790_7_48 | TET2 | EXON | + | chr4: 105259747-105259767 | GCUUGGGGAUGACCCAAAAG | 791 |
| 54790_7_53 | TET2 | EXON | − | chr4: 105259632-105259652 | UUCUGGAUCCAGCCCCUGAC | 792 |
| 54790_7_54 | TET2 | EXON | − | chr4: 105259649-105259669 | AAGGAGGCACCACAGGUUUC | 793 |
| 54790_7_56 | TET2 | EXON | − | chr4: 105259656-105259676 | AAAAGAGAAGGAGGCACCAC | 794 |
| 54790_7_57 | TET2 | EXON | − | chr4: 105259665-105259685 | UGAACAACCAAAAGAGAAGG | 795 |
| 54790_7_58 | TET2 | EXON | − | chr4: 105259668-105259688 | CCAUGAACAACCAAAAGAGA | 796 |
| 54790_7_72 | TET2 | EXON | − | chr4: 105259719-105259739 | CUUCCUUGGGAUCUUGCUUC | 797 |
| 54790_7_73 | TET2 | EXON | − | chr4: 105259732-105259752 | CAAGCAGCUUAAACUUCCUU | 798 |
| 54790_7_74 | TET2 | EXON | − | chr4: 105259733-105259753 | CCAAGCAGCUUAAACUUCCU | 799 |
| 54790_7_80 | TET2 | EXON | − | chr4: 105259762-105259782 | GAAGUAAACAAACCUCUUUU | 800 |
| 54790_7_81 | TET2 | EXON | − | chr4: 105259763-105259783 | GGAAGUAAACAAACCUCUUU | 801 |
| 54790_8_8 | TET2 | EXON | + | chr4: 105261748-105261768 | CUUUAUACAGGAAGAGAAAC | 802 |
| 54790_8_12 | TET2 | EXON | + | chr4: 105261781-105261801 | GCAAAACCUGUCCACUCUUA | 803 |
| 54790_8_18 | TET2 | EXON | + | chr4: 105261826-105261846 | ACCUGAUGCAUAUAAUAAUC | 804 |
| 54790_8_27 | TET2 | EXON | − | chr4: 105261790-105261810 | UUGGUGCCAUAAGAGUGGAC | 805 |
| 54790_8_30 | TET2 | EXON | − | chr4: 105261795-105261815 | AUAUGUUGGUGCCAUAAGAG | 806 |
| 54790_8_34 | TET2 | EXON | − | chr4: 105261809-105261829 | GGUGCAAGUUUCUUAUAUGU | 807 |
| 54790_8_38 | TET2 | EXON | − | chr4: 105261830-105261850 | ACCUGAUUAUUAUAUGCAUC | 808 |
| 54790_9_14 | TET2 | EXON | + | chr4: 105269623-105269643 | CAGAGCACCAGAGUGCCGUC | 809 |
| 54790_9_15 | TET2 | EXON | + | chr4: 105269624-105269644 | AGAGCACCAGAGUGCCGUCU | 810 |
| 54790_9_19 | TET2 | EXON | + | chr4: 105269632-105269652 | AGAGUGCCGUCUGGGUCUGA | 811 |
| 54790_9_20 | TET2 | EXON | + | chr4: 105269636-105269656 | UGCCGUCUGGGUCUGAAGGA | 812 |
| 54790_9_22 | TET2 | EXON | + | chr4: 105269651-105269671 | AAGGAAGGCCGUCCAUUCUC | 813 |
| 54790_9_24 | TET2 | EXON | + | chr4: 105269652-105269672 | AGGAAGGCCGUCCAUUCUCA | 814 |
| 54790_9_25 | TET2 | EXON | + | chr4: 105269653-105269673 | GGAAGGCCGUCCAUUCUCAG | 815 |
| 54790_9_27 | TET2 | EXON | + | chr4: 105269668-105269688 | CUCAGGGGUCACUGCAUGUU | 816 |
| 54790_9_35 | TET2 | EXON | + | chr4: 105269714-105269734 | GACUUGCACAACAUGCAGAA | 817 |
| 54790_9_37 | TET2 | EXON | + | chr4: 105269725-105269745 | CAUGCAGAAUGGCAGCACAU | 818 |
| 54790_9_39 | TET2 | EXON | + | chr4: 105269733-105269753 | AUGGCAGCACAUUGGUAAGU | 819 |
| 54790_9_40 | TET2 | EXON | + | chr4: 105269734-105269754 | UGGCAGCACAUUGGUAAGUU | 820 |
| 54790_9_43 | TET2 | EXON | + | chr4: 105269740-105269760 | CACAUUGGUAAGUUGGGCUG | 821 |
| 54790_9_49 | TET2 | EXON | − | chr4: 105269633-105269653 | UUCAGACCCAGACGGCACUC | 822 |
| 54790_9_50 | TET2 | EXON | − | chr4: 105269641-105269661 | GGCCUUCCUUCAGACCCAGA | 823 |
| 54790_9_51 | TET2 | EXON | − | chr4: 105269662-105269682 | CAGUGACCCCUGAGAAUGGA | 824 |
| 54790_9_52 | TET2 | EXON | − | chr4: 105269666-105269686 | CAUGCAGUGACCCCUGAGAA | 825 |
| 54790_9_61 | TET2 | EXON | − | chr4: 105269709-105269729 | CAUGUUGUGCAAGUCUCUGU | 826 |
| 54790_9_62 | TET2 | EXON | − | chr4: 105269710-105269730 | GCAUGUUGUGCAAGUCUCUG | 827 |
| 54790_10_10 | TET2 | EXON | + | chr4: 105272578-105272598 | AGAGAAGACAAUCGAGAAUU | 828 |
| 54790_10_13 | TET2 | EXON | + | chr4: 105272581-105272601 | GAAGACAAUCGAGAAUUUGG | 829 |
| 54790_10_16 | TET2 | EXON | + | chr4: 105272592-105272612 | AGAAUUUGGAGGAAAACCUG | 830 |
| 54790_10_23 | TET2 | EXON | + | chr4: 105272637-105272657 | UUUAUACAAAGUCUCUGACG | 831 |
| 54790_10_29 | TET2 | EXON | + | chr4: 105272647-105272667 | GUCUCUGACGUGGAUGAGUU | 832 |
| 54790_10_30 | TET2 | EXON | + | chr4: 105272648-105272668 | UCUCUGACGUGGAUGAGUUU | 833 |
| 54790_10_33 | TET2 | EXON | + | chr4: 105272655-105272675 | CGUGGAUGAGUUUGGGAGUG | 834 |
| 54790_10_36 | TET2 | EXON | + | chr4: 105272664-105272684 | GUUUGGGAGUGUGGAAGCUC | 835 |
| 54790_10_40 | TET2 | EXON | + | chr4: 105272667-105272687 | UGGGAGUGUGGAAGCUCAGG | 836 |
| 54790_10_46 | TET2 | EXON | + | chr4: 105272678-105272698 | AAGCUCAGGAGGAGAAAAAA | 837 |
| 54790_10_48 | TET2 | EXON | + | chr4: 105272683-105272703 | CAGGAGGAGAAAAAACGGAG | 838 |
| 54790_10_49 | TET2 | EXON | + | chr4: 105272694-105272714 | AAAACGGAGUGGUGCCAUUC | 839 |
| 54790_10_51 | TET2 | EXON | + | chr4: 105272711-105272731 | UUCAGGUACUGAGUUCUUUU | 840 |
| 54790_10_55 | TET2 | EXON | + | chr4: 105272723-105272743 | GUUCUUUUCGGCGAAAAGUC | 841 |
| 54790_10_64 | TET2 | EXON | + | chr4: 105272759-105272779 | CAGUCAAGACUUGCCGACAA | 842 |
| 54790_10_71 | TET2 | EXON | + | chr4: 105272805-105272825 | AGCUGAAAAGCUUUCCUCCC | 843 |
| 54790_10_78 | TET2 | EXON | + | chr4: 105272832-105272852 | CAGCUCAAAUAAAAAUGAAA | 844 |
| 54790_10_81 | TET2 | EXON | + | chr4: 105272880-105272900 | ACAAACUGAAAACGCAAGCC | 845 |
| 54790_10_82 | TET2 | EXON | + | chr4: 105272892-105272912 | CGCAAGCCAGGCUAAACAGU | 846 |
| 54790_10_83 | TET2 | EXON | + | chr4: 105272896-105272916 | AGCCAGGCUAAACAGUUGGC | 847 |
| 54790_10_85 | TET2 | EXON | − | chr4: 105272557-105272577 | GUGAGAGUGCAUACCUGGUA | 848 |
| 54790_10_87 | TET2 | EXON | − | chr4: 105272558-105272578 | AGUGAGAGUGCAUACCUGGU | 849 |
| 54790_10_91 | TET2 | EXON | − | chr4: 105272562-105272582 | CUCUAGUGAGAGUGCAUACC | 850 |
| 54790_10_99 | TET2 | EXON | − | chr4: 105272611-105272631 | ACGUGAAGCUGCUCAUCCUC | 851 |
| 54790_10_105 | TET2 | EXON | − | chr4: 105272638-105272658 | ACGUCAGAGACUUUGUAUAA | 852 |
| 54790_10_114 | TET2 | EXON | − | chr4: 105272711-105272731 | AAAAGAACUCAGUACCUGAA | 853 |
| 54790_10_127 | TET2 | EXON | − | chr4: 105272761-105272781 | CUUUGUCGGCAAGUCUUGAC | 854 |
| 54790_10_132 | TET2 | EXON | − | chr4: 105272775-105272795 | UGGCUUCUAGUUUCCUUUGU | 855 |
| 54790_10_136 | TET2 | EXON | − | chr4: 105272795-105272815 | CUUUUCAGCUGCAGCUUUCU | 856 |
| 54790_10_145 | TET2 | EXON | − | chr4: 105272822-105272842 | AUUUGAGCUGUUCUCCAGGG | 857 |
| 54790_10_147 | TET2 | EXON | − | chr4: 105272825-105272845 | UUUAUUUGAGCUGUUCUCCA | 858 |
| 54790_10_150 | TET2 | EXON | − | chr4: 105272826-105272846 | UUUUAUUUGAGCUGUUCUCC | 859 |
| 54790_10_167 | TET2 | EXON | − | chr4: 105272867-105272887 | AGUUUGUUUUGUACGUGAUG | 860 |
| 54790_10_168 | TET2 | EXON | − | chr4: 105272868-105272888 | CAGUUUGUUUUGUACGUGAU | 861 |
| 54790_10_169 | TET2 | EXON | − | chr4: 105272869-105272889 | UCAGUUUGUUUUGUACGUGA | 862 |
| 54790_10_177 | TET2 | EXON | − | chr4: 105272901-105272921 | UACCUGCCAACUGUUUAGCC | 863 |
| 54790_11_9 | TET2 | EXON | + | chr4: 105275178-105275198 | GUCAACUCUUAUUCUGCUUC | 864 |
| 54790_11_14 | TET2 | EXON | + | chr4: 105275203-105275223 | CCACCAAUCCAUACAUGAGA | 865 |
| 54790_11_19 | TET2 | EXON | + | chr4: 105275256-105275276 | UCACACACUUCAGAUAUCUA | 866 |
| 54790_11_24 | TET2 | EXON | + | chr4: 105275304-105275324 | UCCACCUCAUCUCAAGCUGC | 867 |
| 54790_11_34 | TET2 | EXON | + | chr4: 105275346-105275366 | AAUCCCAUGAACCCUUACCC | 868 |
| 54790_11_35 | TET2 | EXON | + | chr4: 105275347-105275367 | AUCCCAUGAACCCUUACCCU | 869 |
| 54790_11_44 | TET2 | EXON | + | chr4: 105275391-105275411 | UAUCCAUCAUAUCAAUGCAA | 870 |
| 54790_11_47 | TET2 | EXON | + | chr4: 105275405-105275425 | AUGCAAUGGAAACCUAUCAG | 871 |
| 54790_11_49 | TET2 | EXON | + | chr4: 105275426-105275446 | GGACAACUGCUCCCCAUAUC | 872 |
| 54790_11_50 | TET2 | EXON | + | chr4: 105275427-105275447 | GACAACUGCUCCCCAUAUCU | 873 |
| 54790_11_53 | TET2 | EXON | + | chr4: 105275456-105275476 | UUCUCCCCAGUCUCAGCCGA | 874 |
| 54790_11_55 | TET2 | EXON | + | chr4: 105275467-105275487 | CUCAGCCGAUGGAUCUGUAU | 875 |
| 54790_11_56 | TET2 | EXON | + | chr4: 105275533-105275553 | UCCAUACACUUUACCAGCCA | 876 |
| 54790_11_59 | TET2 | EXON | + | chr4: 105275538-105275558 | ACACUUUACCAGCCAAGGUU | 877 |
| 54790_11_65 | TET2 | EXON | + | chr4: 105275571-105275591 | AGUUUUACAUCUAAAUACUU | 878 |
| 54790_11_68 | TET2 | EXON | + | chr4: 105275577-105275597 | ACAUCUAAAUACUUAGGUUA | 879 |
| 54790_11_74 | TET2 | EXON | + | chr4: 105275594-105275614 | UUAUGGAAACCAAAAUAUGC | 880 |
| 54790_11_77 | TET2 | EXON | + | chr4: 105275595-105275615 | UAUGGAAACCAAAAUAUGCA | 881 |
| 54790_11_79 | TET2 | EXON | + | chr4: 105275601-105275621 | AACCAAAAUAUGCAGGGAGA | 882 |
| 54790_11_85 | TET2 | EXON | + | chr4: 105275643-105275663 | AGACCAAAUGUACAUCAUGU | 883 |
| 54790_11_86 | TET2 | EXON | + | chr4: 105275644-105275664 | GACCAAAUGUACAUCAUGUA | 884 |
| 54790_11_92 | TET2 | EXON | + | chr4: 105275675-105275695 | UCCUUAUCCCACUCAUGAGA | 885 |
| 54790_11_93 | TET2 | EXON | + | chr4: 105275679-105275699 | UAUCCCACUCAUGAGAUGGA | 886 |
| 54790_11_96 | TET2 | EXON | + | chr4: 105275690-105275710 | UGAGAUGGAUGGCCACUUCA | 887 |
| 54790_11_99 | TET2 | EXON | + | chr4: 105275691-105275711 | GAGAUGGAUGGCCACUUCAU | 888 |
| 54790_11_104 | TET2 | EXON | + | chr4: 105275735-105275755 | CAAUCUGAGCAAUCCAAACA | 889 |
| 54790_11_105 | TET2 | EXON | + | chr4: 105275748-105275768 | CCAAACAUGGACUAUAAAAA | 890 |
| 54790_11_110 | TET2 | EXON | + | chr4: 105275798-105275818 | CCAUAACUACAGUGCAGCUC | 891 |
| 54790_11_111 | TET2 | EXON | + | chr4: 105275799-105275819 | CAUAACUACAGUGCAGCUCC | 892 |
| 54790_11_116 | TET2 | EXON | + | chr4: 105275843-105275863 | UGCCCUGCAUCUCCAAAACA | 893 |
| 54790_11_120 | TET2 | EXON | + | chr4: 105275874-105275894 | AUGCUUUCCCACACAGCUAA | 894 |
| 54790_11_121 | TET2 | EXON | + | chr4: 105275875-105275895 | UGCUUUCCCACACAGCUAAU | 895 |
| 54790_11_129 | TET2 | EXON | + | chr4: 105275928-105275948 | GAUAGAACUGCUUGUGUCCA | 896 |
| 54790_11_131 | TET2 | EXON | + | chr4: 105275931-105275951 | AGAACUGCUUGUGUCCAAGG | 897 |
| 54790_11_133 | TET2 | EXON | + | chr4: 105275958-105275978 | CACAAAUUAAGUGAUGCUAA | 898 |
| 54790_11_137 | TET2 | EXON | + | chr4: 105275963-105275983 | AUUAAGUGAUGCUAAUGGUC | 899 |
| 54790_11_139 | TET2 | EXON | + | chr4: 105275978-105275998 | UGGUCAGGAAAAGCAGCCAU | 900 |
| 54790_11_141 | TET2 | EXON | + | chr4: 105275990-105276010 | GCAGCCAUUGGCACUAGUCC | 901 |
| 54790_11_142 | TET2 | EXON | + | chr4: 105275991-105276011 | CAGCCAUUGGCACUAGUCCA | 902 |
| 54790_11_143 | TET2 | EXON | + | chr4: 105275996-105276016 | AUUGGCACUAGUCCAGGGUG | 903 |
| 54790_11_145 | TET2 | EXON | + | chr4: 105276003-105276023 | CUAGUCCAGGGUGUGGCUUC | 904 |
| 54790_11_148 | TET2 | EXON | + | chr4: 105276011-105276031 | GGGUGUGGCUUCUGGUGCAG | 905 |
| 54790_11_150 | TET2 | EXON | + | chr4: 105276023-105276043 | UGGUGCAGAGGACAACGAUG | 906 |
| 54790_11_152 | TET2 | EXON | + | chr4: 105276028-105276048 | CAGAGGACAACGAUGAGGUC | 907 |
| 54790_11_156 | TET2 | EXON | + | chr4: 105276053-105276073 | AGACAGCGAGCAGAGCUUUC | 908 |
| 54790_11_158 | TET2 | EXON | + | chr4: 105276066-105276086 | AGCUUUCUGGAUCCUGACAU | 909 |
| 54790_11_160 | TET2 | EXON | + | chr4: 105276067-105276087 | GCUUUCUGGAUCCUGACAUU | 910 |
| 54790_11_162 | TET2 | EXON | + | chr4: 105276068-105276088 | CUUUCUGGAUCCUGACAUUG | 911 |
| 54790_11_165 | TET2 | EXON | + | chr4: 105276069-105276089 | UUUCUGGAUCCUGACAUUGG | 912 |
| 54790_11_168 | TET2 | EXON | + | chr4: 105276074-105276094 | GGAUCCUGACAUUGGGGGAG | 913 |
| 54790_11_169 | TET2 | EXON | + | chr4: 105276080-105276100 | UGACAUUGGGGGAGUGGCCG | 914 |
| 54790_11_172 | TET2 | EXON | + | chr4: 105276093-105276113 | GUGGCCGUGGCUCCAACUCA | 915 |
| 54790_11_173 | TET2 | EXON | + | chr4: 105276094-105276114 | UGGCCGUGGCUCCAACUCAU | 916 |
| 54790_11_182 | TET2 | EXON | + | chr4: 105276160-105276180 | CCCCUUUAAAGAAUCCCAAU | 917 |
| 54790_11_186 | TET2 | EXON | + | chr4: 105276175-105276195 | CCAAUAGGAAUCACCCCACC | 918 |
| 54790_11_193 | TET2 | EXON | + | chr4: 105276225-105276245 | AGCAUGAAUGAGCCAAAACA | 919 |
| 54790_11_194 | TET2 | EXON | + | chr4: 105276230-105276250 | GAAUGAGCCAAAACAUGGCU | 920 |
| 54790_11_196 | TET2 | EXON | + | chr4: 105276238-105276258 | CAAAACAUGGCUUGGCUCUU | 921 |
| 54790_11_199 | TET2 | EXON | + | chr4: 105276239-105276259 | AAAACAUGGCUUGGCUCUUU | 922 |
| 54790_11_200 | TET2 | EXON | + | chr4: 105276251-105276271 | GGCUCUUUGGGAAGCCAAAA | 923 |
| 54790_11_210 | TET2 | EXON | + | chr4: 105276275-105276295 | UGAAAAAGCCCGUGAGAAAG | 924 |
| 54790_11_214 | TET2 | EXON | + | chr4: 105276294-105276314 | GAGGAAGAGUGUGAAAAGUA | 925 |
| 54790_11_217 | TET2 | EXON | + | chr4: 105276324-105276344 | UAUGUGCCUCAGAAAUCCCA | 926 |
| 54790_11_221 | TET2 | EXON | + | chr4: 105276340-105276360 | CCCAUGGCAAAAAAGUGAAA | 927 |
| 54790_11_223 | TET2 | EXON | + | chr4: 105276341-105276361 | CCAUGGCAAAAAAGUGAAAC | 928 |
| 54790_11_231 | TET2 | EXON | + | chr4: 105276409-105276429 | UCAUCAAGUCUCUUGCCGAA | 929 |
| 54790_11_236 | TET2 | EXON | + | chr4: 105276466-105276486 | CAUCUCCAUAUGCCUUCACU | 930 |
| 54790_11_237 | TET2 | EXON | + | chr4: 105276467-105276487 | AUCUCCAUAUGCCUUCACUC | 931 |
| 54790_11_239 | TET2 | EXON | + | chr4: 105276474-105276494 | UAUGCCUUCACUCGGGUCAC | 932 |
| 54790_11_240 | TET2 | EXON | + | chr4: 105276475-105276495 | AUGCCUUCACUCGGGUCACA | 933 |
| 54790_11_243 | TET2 | EXON | + | chr4: 105276515-105276535 | AUGAUAUCACCCCCUUUUGU | 934 |
| 54790_11_252 | TET2 | EXON | + | chr4: 105276573-105276593 | GUAGUAUAGUUCUCAUGACG | 935 |
| 54790_11_253 | TET2 | EXON | + | chr4: 105276574-105276594 | UAGUAUAGUUCUCAUGACGU | 936 |
| 54790_11_256 | TET2 | EXON | + | chr4: 105276580-105276600 | AGUUCUCAUGACGUGGGCAG | 937 |
| 54790_11_258 | TET2 | EXON | + | chr4: 105276581-105276601 | GUUCUCAUGACGUGGGCAGU | 938 |
| 54790_11_259 | TET2 | EXON | + | chr4: 105276582-105276602 | UUCUCAUGACGUGGGCAGUG | 939 |
| 54790_11_262 | TET2 | EXON | + | chr4: 105276587-105276607 | AUGACGUGGGCAGUGGGGAA | 940 |
| 54790_11_263 | TET2 | EXON | + | chr4: 105276611-105276631 | CACAGUAUUCAUGACAAAUG | 941 |
| 54790_11_265 | TET2 | EXON | + | chr4: 105276614-105276634 | AGUAUUCAUGACAAAUGUGG | 942 |
| 54790_11_267 | TET2 | EXON | + | chr4: 105276615-105276635 | GUAUUCAUGACAAAUGUGGU | 943 |
| 54790_11_271 | TET2 | EXON | + | chr4: 105276646-105276666 | CAGCUCACCAGCAACAAAAG | 944 |
| 54790_11_273 | TET2 | EXON | + | chr4: 105276677-105276697 | CCAUAGCACUUAAUUUUCAC | 945 |
| 54790_11_275 | TET2 | EXON | + | chr4: 105276688-105276708 | AAUUUUCACUGGCUCCCAAG | 946 |
| 54790_11_280 | TET2 | EXON | + | chr4: 105276698-105276718 | GGCUCCCAAGUGGUCACAGA | 947 |
| 54790_11_283 | TET2 | EXON | + | chr4: 105276706-105276726 | AGUGGUCACAGAUGGCAUCU | 948 |
| 54790_11_285 | TET2 | EXON | + | chr4: 105276738-105276758 | AAGCAUUCUAUGCAAAAAGA | 949 |
| 54790_11_288 | TET2 | EXON | + | chr4: 105276741-105276761 | CAUUCUAUGCAAAAAGAAGG | 950 |
| 54790_11_289 | TET2 | EXON | + | chr4: 105276742-105276762 | AUUCUAUGCAAAAAGAAGGU | 951 |
| 54790_11_291 | TET2 | EXON | + | chr4: 105276743-105276763 | UUCUAUGCAAAAAGAAGGUG | 952 |
| 54790_11_297 | TET2 | EXON | + | chr4: 105276780-105276800 | CAAUUUACAUUUUUAAACAC | 953 |
| 54790_11_302 | TET2 | EXON | + | chr4: 105276792-105276812 | UUAAACACUGGUUCUAUUAU | 954 |
| 54790_11_316 | TET2 | EXON | + | chr4: 105276885-105276905 | AUAUCAAGUUUGCAUAGUCA | 955 |
| 54790_11_321 | TET2 | EXON | + | chr4: 105276925-105276945 | UACUGUAGUAUUACAGUGAC | 956 |
| 54790_11_323 | TET2 | EXON | + | chr4: 105276945-105276965 | AGGAAUCUUAAAAUACCAUC | 957 |
| 54790_11_329 | TET2 | EXON | + | chr4: 105276975-105276995 | UAUAUGAUGUACUGAAAUAC | 958 |
| 54790_11_330 | TET2 | EXON | + | chr4: 105276983-105277003 | GUACUGAAAUACUGGAAUUA | 959 |
| 54790_11_344 | TET2 | EXON | + | chr4: 105277042-105277062 | UUAUUUAUCAAAAUAGCUAC | 960 |
| 54790_11_352 | TET2 | EXON | + | chr4: 105277058-105277078 | CUACAGGAAACAUGAAUAGC | 961 |
| 54790_11_356 | TET2 | EXON | + | chr4: 105277078-105277098 | AGGAAAACACUGAAUUUGUU | 962 |
| 54790_11_359 | TET2 | EXON | + | chr4: 105277094-105277114 | UGUUUGGAUGUUCUAAGAAA | 963 |
| 54790_11_367 | TET2 | EXON | + | chr4: 105277108-105277128 | AAGAAAUGGUGCUAAGAAAA | 964 |
| 54790_11_377 | TET2 | EXON | + | chr4: 105277187-105277207 | CUCCAGUGCCCUUGAAUAAU | 965 |
| 54790_11_378 | TET2 | EXON | + | chr4: 105277188-105277208 | UCCAGUGCCCUUGAAUAAUA | 966 |
| 54790_11_379 | TET2 | EXON | + | chr4: 105277189-105277209 | CCAGUGCCCUUGAAUAAUAG | 967 |
| 54790_11_393 | TET2 | EXON | + | chr4: 105277255-105277275 | CAAGCUUAGUUUUUAAAAUG | 968 |
| 54790_11_395 | TET2 | EXON | + | chr4: 105277267-105277287 | UUAAAAUGUGGACAUUUUAA | 969 |
| 54790_11_401 | TET2 | EXON | + | chr4: 105277274-105277294 | GUGGACAUUUUAAAGGCCUC | 970 |
| 54790_11_410 | TET2 | EXON | + | chr4: 105277304-105277324 | UCAUCCAGUGAAGUCCUUGU | 971 |
| 54790_11_419 | TET2 | EXON | + | chr4: 105277438-105277458 | UGACAACUUGAACAAUGCUA | 972 |
| 54790_11_437 | TET2 | EXON | + | chr4: 105277501-105277521 | AUGCAAAGUUGAUUUUUUUA | 973 |
| 54790_11_465 | TET2 | EXON | + | chr4: 105277599-105277619 | ACAGCCAGUUAAAUCCACCA | 974 |
| 54790_11_466 | TET2 | EXON | + | chr4: 105277600-105277620 | CAGCCAGUUAAAUCCACCAU | 975 |
| 54790_11_467 | TET2 | EXON | + | chr4: 105277601-105277621 | AGCCAGUUAAAUCCACCAUG | 976 |
| 54790_11_469 | TET2 | EXON | + | chr4: 105277609-105277629 | AAAUCCACCAUGGGGCUUAC | 977 |
| 54790_11_472 | TET2 | EXON | + | chr4: 105277617-105277637 | CAUGGGGCUUACUGGAUUCA | 978 |
| 54790_11_474 | TET2 | EXON | + | chr4: 105277618-105277638 | AUGGGGCUUACUGGAUUCAA | 979 |
| 54790_11_478 | TET2 | EXON | + | chr4: 105277649-105277669 | AGUCCACAAAACAUGUUUUC | 980 |
| 54790_11_492 | TET2 | EXON | + | chr4: 105277753-105277773 | AAGAAUUUUCUAUUAACUGC | 981 |
| 54790_11_503 | TET2 | EXON | + | chr4: 105277818-105277838 | CUGAAGCCUAUGCUAUUUUA | 982 |
| 54790_11_504 | TET2 | EXON | + | chr4: 105277826-105277846 | UAUGCUAUUUUAUGGAUCAU | 983 |
| 54790_11_511 | TET2 | EXON | + | chr4: 105277846-105277866 | AGGCUCUUCAGAGAACUGAA | 984 |
| 54790_11_524 | TET2 | EXON | + | chr4: 105277924-105277944 | UAAGUGUCCUCUUUAACAAG | 985 |
| 54790_11_532 | TET2 | EXON | + | chr4: 105277963-105277983 | CCUGCAUAAGAUGAAUAAAC | 986 |
| 54790_11_533 | TET2 | EXON | + | chr4: 105277964-105277984 | CUGCAUAAGAUGAAUAAACA | 987 |
| 54790_11_539 | TET2 | EXON | + | chr4: 105278008-105278028 | AGUUAAAAAGAAACAAAAAC | 988 |
| 54790_11_541 | TET2 | EXON | + | chr4: 105278015-105278035 | AAGAAACAAAAACAGGCAGC | 989 |
| 54790_11_542 | TET2 | EXON | + | chr4: 105278025-105278045 | AACAGGCAGCUGGUUUGCUG | 990 |
| 54790_11_543 | TET2 | EXON | + | chr4: 105278028-105278048 | AGGCAGCUGGUUUGCUGUGG | 991 |
| 54790_11_574 | TET2 | EXON | + | chr4: 105278210-105278230 | AAGCAGAAUUCACAUCAUGA | 992 |
| 54790_11_587 | TET2 | EXON | + | chr4: 105278310-105278330 | CAUAUACCUCAACACUAGUU | 993 |
| 54790_11_589 | TET2 | EXON | + | chr4: 105278317-105278337 | CUCAACACUAGUUUGGCAAU | 994 |
| 54790_11_627 | TET2 | EXON | + | chr4: 105278467-105278487 | CCUUUUUGUUCUAAAAAUUC | 995 |
| 54790_11_628 | TET2 | EXON | + | chr4: 105278468-105278488 | CUUUUUGUUCUAAAAAUUCA | 996 |
| 54790_11_637 | TET2 | EXON | + | chr4: 105278532-105278552 | UGUUUAUGUAAAAUUGUUGU | 997 |
| 54790_11_643 | TET2 | EXON | + | chr4: 105278556-105278576 | UAAUAAAUAUAUUCUUUGUC | 998 |
| 54790_11_645 | TET2 | EXON | + | chr4: 105278557-105278577 | AAUAAAUAUAUUCUUUGUCA | 999 |
| 54790_11_664 | TET2 | EXON | + | chr4: 105278640-105278660 | AACUAAUUUUGUAAAUCUGU | 1000 |
| 54790_11_679 | TET2 | EXON | + | chr4: 105278680-105278700 | AAAAGCAUUUUAAAAGUUUG | 1001 |
| 54790_11_686 | TET2 | EXON | + | chr4: 105278704-105278724 | AUCUUUUGACUGUUUCAAGC | 1002 |
| 54790_11_700 | TET2 | EXON | + | chr4: 105278748-105278768 | AGAAUGCACUGAGUUGAUAA | 1003 |
| 54790_11_701 | TET2 | EXON | + | chr4: 105278749-105278769 | GAAUGCACUGAGUUGAUAAA | 1004 |
| 54790_11_703 | TET2 | EXON | + | chr4: 105278762-105278782 | UGAUAAAGGGAAAAAUUGUA | 1005 |
| 54790_11_707 | TET2 | EXON | + | chr4: 105278766-105278786 | AAAGGGAAAAAUUGUAAGGC | 1006 |
| 54790_11_708 | TET2 | EXON | + | chr4: 105278773-105278793 | AAAAUUGUAAGGCAGGAGUU | 1007 |
| 54790_11_710 | TET2 | EXON | + | chr4: 105278780-105278800 | UAAGGCAGGAGUUUGGCAAG | 1008 |
| 54790_11_711 | TET2 | EXON | + | chr4: 105278787-105278807 | GGAGUUUGGCAAGUGGCUGU | 1009 |
| 54790_11_721 | TET2 | EXON | + | chr4: 105278846-105278866 | UUUGAUCCUGUAAUCACUGA | 1010 |
| 54790_11_728 | TET2 | EXON | + | chr4: 105278862-105278882 | CUGAAGGUACAUACUCCAUG | 1011 |
| 54790_11_729 | TET2 | EXON | + | chr4: 105278878-105278898 | CAUGUGGACUUCCCUUAAAC | 1012 |
| 54790_11_731 | TET2 | EXON | + | chr4: 105278892-105278912 | UUAAACAGGCAAACACCUAC | 1013 |
| 54790_11_733 | TET2 | EXON | + | chr4: 105278897-105278917 | CAGGCAAACACCUACAGGUA | 1014 |
| 54790_11_734 | TET2 | EXON | + | chr4: 105278927-105278947 | CAGAUUGUACAAUUACAUUU | 1015 |
| 54790_11_748 | TET2 | EXON | + | chr4: 105278978-105278998 | UAAAAUAAAUUCUUAAUCAG | 1016 |
| 54790_11_751 | TET2 | EXON | + | chr4: 105278981-105279001 | AAUAAAUUCUUAAUCAGAGG | 1017 |
| 54790_11_753 | TET2 | EXON | + | chr4: 105278988-105279008 | UCUUAAUCAGAGGAGGCCUU | 1018 |
| 54790_11_754 | TET2 | EXON | + | chr4: 105278989-105279009 | CUUAAUCAGAGGAGGCCUUU | 1019 |
| 54790_11_757 | TET2 | EXON | + | chr4: 105278998-105279018 | AGGAGGCCUUUGGGUUUUAU | 1020 |
| 54790_11_762 | TET2 | EXON | + | chr4: 105279017-105279037 | UUGGUCAAAUCUUUGUAAGC | 1021 |
| 54790_11_772 | TET2 | EXON | + | chr4: 105279052-105279072 | UAAAAAAUUUCUUGAAUUUG | 1022 |
| 54790_11_799 | TET2 | EXON | + | chr4: 105279173-105279193 | UUUGAUUACUACAUGUGCAU | 1023 |
| 54790_11_813 | TET2 | EXON | + | chr4: 105279240-105279260 | ACUGUCAUUUGUUAAACUGC | 1024 |
| 54790_11_818 | TET2 | EXON | + | chr4: 105279254-105279274 | AACUGCUGGCCAACAAGAAC | 1025 |
| 54790_11_822 | TET2 | EXON | + | chr4: 105279267-105279287 | CAAGAACAGGAAGUAUAGUU | 1026 |
| 54790_11_825 | TET2 | EXON | + | chr4: 105279268-105279288 | AAGAACAGGAAGUAUAGUUU | 1027 |
| 54790_11_827 | TET2 | EXON | + | chr4: 105279269-105279289 | AGAACAGGAAGUAUAGUUUG | 1028 |
| 54790_11_828 | TET2 | EXON | + | chr4: 105279270-105279290 | GAACAGGAAGUAUAGUUUGG | 1029 |
| 54790_11_829 | TET2 | EXON | + | chr4: 105279271-105279291 | AACAGGAAGUAUAGUUUGGG | 1030 |
| 54790_11_832 | TET2 | EXON | + | chr4: 105279275-105279295 | GGAAGUAUAGUUUGGGGGGU | 1031 |
| 54790_11_833 | TET2 | EXON | + | chr4: 105279276-105279296 | GAAGUAUAGUUUGGGGGGUU | 1032 |
| 54790_11_836 | TET2 | EXON | + | chr4: 105279277-105279297 | AAGUAUAGUUUGGGGGGUUG | 1033 |
| 54790_11_841 | TET2 | EXON | + | chr4: 105279292-105279312 | GGUUGGGGAGAGUUUACAUA | 1034 |
| 54790_11_851 | TET2 | EXON | + | chr4: 105279311-105279331 | AAGGAAGAGAAGAAAUUGAG | 1035 |
| 54790_11_859 | TET2 | EXON | + | chr4: 105279373-105279393 | CCUGCCUCAGUUAGAAUGAA | 1036 |
| 54790_11_864 | TET2 | EXON | + | chr4: 105279402-105279422 | GAUCUACAAUUUGCUAAUAU | 1037 |
| 54790_11_865 | TET2 | EXON | + | chr4: 105279411-105279431 | UUUGCUAAUAUAGGAAUAUC | 1038 |
| 54790_11_871 | TET2 | EXON | + | chr4: 105279449-105279469 | UACUUGAAAAUGCUUCUGAG | 1039 |
| 54790_11_886 | TET2 | EXON | + | chr4: 105279524-105279544 | CAGUUCACUUCUGAAGCUAG | 1040 |
| 54790_11_890 | TET2 | EXON | + | chr4: 105279538-105279558 | AGCUAGUGGUUAACUUGUGU | 1041 |
| 54790_11_912 | TET2 | EXON | + | chr4: 105279632-105279652 | UUUCAUUUUCAUGAGAUGUU | 1042 |
| 54790_11_920 | TET2 | EXON | + | chr4: 105279648-105279668 | UGUUUGGUUUAUAAGAUCUG | 1043 |
| 54790_11_921 | TET2 | EXON | + | chr4: 105279652-105279672 | UGGUUUAUAAGAUCUGAGGA | 1044 |
| 54790_11_928 | TET2 | EXON | + | chr4: 105279691-105279711 | UAUUGUAAUGUUAUGAAUGC | 1045 |
| 54790_11_954 | TET2 | EXON | − | chr4: 105275038-105275058 | UCGCAAAAGUUCUGUGGACA | 1046 |
| 54790_11_955 | TET2 | EXON | − | chr4: 105275039-105275059 | GUCGCAAAAGUUCUGUGGAC | 1047 |
| 54790_11_957 | TET2 | EXON | − | chr4: 105275044-105275064 | ACAAAGUCGCAAAAGUUCUG | 1048 |
| 54790_11_960 | TET2 | EXON | − | chr4: 105275165-105275185 | AGUUGACAGACUCUGUCUGA | 1049 |
| 54790_11_961 | TET2 | EXON | − | chr4: 105275166-105275186 | GAGUUGACAGACUCUGUCUG | 1050 |
| 54790_11_970 | TET2 | EXON | − | chr4: 105275206-105275226 | CCGUCUCAUGUAUGGAUUGG | 1051 |
| 54790_11_972 | TET2 | EXON | − | chr4: 105275209-105275229 | GGGCCGUCUCAUGUAUGGAU | 1052 |
| 54790_11_973 | TET2 | EXON | − | chr4: 105275214-105275234 | GGAUUGGGCCGUCUCAUGUA | 1053 |
| 54790_11_977 | TET2 | EXON | − | chr4: 105275229-105275249 | GGAUAAGGACUAACUGGAUU | 1054 |
| 54790_11_978 | TET2 | EXON | − | chr4: 105275230-105275250 | UGGAUAAGGACUAACUGGAU | 1055 |
| 54790_11_980 | TET2 | EXON | − | chr4: 105275235-105275255 | GAGUUUGGAUAAGGACUAAC | 1056 |
| 54790_11_982 | TET2 | EXON | − | chr4: 105275244-105275264 | GUGUGUGAAGAGUUUGGAUA | 1057 |
| 54790_11_984 | TET2 | EXON | − | chr4: 105275250-105275270 | UCUGAAGUGUGUGAAGAGUU | 1058 |
| 54790_11_991 | TET2 | EXON | − | chr4: 105275287-105275307 | GGAAUAGAAGUUCAUAGGGC | 1059 |
| 54790_11_992 | TET2 | EXON | − | chr4: 105275291-105275311 | AGGUGGAAUAGAAGUUCAUA | 1060 |
| 54790_11_993 | TET2 | EXON | − | chr4: 105275292-105275312 | GAGGUGGAAUAGAAGUUCAU | 1061 |
| 54790_11_999 | TET2 | EXON | − | chr4: 105275308-105275328 | ACCUGCAGCUUGAGAUGAGG | 1062 |
| 54790_11_1001 | TET2 | EXON | − | chr4: 105275311-105275331 | UGAACCUGCAGCUUGAGAUG | 1063 |
| 54790_11_1012 | TET2 | EXON | − | chr4: 105275352-105275372 | AGCCCAGGGUAAGGGUUCAU | 1064 |
| 54790_11_1013 | TET2 | EXON | − | chr4: 105275353-105275373 | AAGCCCAGGGUAAGGGUUCA | 1065 |
| 54790_11_1017 | TET2 | EXON | − | chr4: 105275360-105275380 | GAUUCAAAAGCCCAGGGUAA | 1066 |
| 54790_11_1018 | TET2 | EXON | − | chr4: 105275361-105275381 | UGAUUCAAAAGCCCAGGGUA | 1067 |
| 54790_11_1021 | TET2 | EXON | − | chr4: 105275366-105275386 | UAUUCUGAUUCAAAAGCCCA | 1068 |
| 54790_11_1022 | TET2 | EXON | − | chr4: 105275367-105275387 | GUAUUCUGAUUCAAAAGCCC | 1069 |
| 54790_11_1026 | TET2 | EXON | − | chr4: 105275389-105275409 | GCAUUGAUAUGAUGGAUAUU | 1070 |
| 54790_11_1027 | TET2 | EXON | − | chr4: 105275390-105275410 | UGCAUUGAUAUGAUGGAUAU | 1071 |
| 54790_11_1031 | TET2 | EXON | − | chr4: 105275397-105275417 | UUUCCAUUGCAUUGAUAUGA | 1072 |
| 54790_11_1034 | TET2 | EXON | − | chr4: 105275420-105275440 | GGGAGCAGUUGUCCACUGAU | 1073 |
| 54790_11_1035 | TET2 | EXON | − | chr4: 105275440-105275460 | AGAAUAGGAACCCAGAUAUG | 1074 |
| 54790_11_1037 | TET2 | EXON | − | chr4: 105275441-105275461 | GAGAAUAGGAACCCAGAUAU | 1075 |
| 54790_11_1040 | TET2 | EXON | − | chr4: 105275442-105275462 | GGAGAAUAGGAACCCAGAUA | 1076 |
| 54790_11_1042 | TET2 | EXON | − | chr4: 105275455-105275475 | CGGCUGAGACUGGGGAGAAU | 1077 |
| 54790_11_1046 | TET2 | EXON | − | chr4: 105275463-105275483 | AGAUCCAUCGGCUGAGACUG | 1078 |
| 54790_11_1049 | TET2 | EXON | − | chr4: 105275464-105275484 | CAGAUCCAUCGGCUGAGACU | 1079 |
| 54790_11_1050 | TET2 | EXON | − | chr4: 105275465-105275485 | ACAGAUCCAUCGGCUGAGAC | 1080 |
| 54790_11_1055 | TET2 | EXON | − | chr4: 105275475-105275495 | GGAUACCUAUACAGAUCCAU | 1081 |
| 54790_11_1058 | TET2 | EXON | − | chr4: 105275496-105275516 | UUAGACAGAGGGUCUUGGCU | 1082 |
| 54790_11_1060 | TET2 | EXON | − | chr4: 105275501-105275521 | UGAGCUUAGACAGAGGGUCU | 1083 |
| 54790_11_1061 | TET2 | EXON | − | chr4: 105275507-105275527 | GUAGACUGAGCUUAGACAGA | 1084 |
| 54790_11_1062 | TET2 | EXON | − | chr4: 105275508-105275528 | GGUAGACUGAGCUUAGACAG | 1085 |
| 54790_11_1067 | TET2 | EXON | − | chr4: 105275529-105275549 | UGGUAAAGUGUAUGGAUGGG | 1086 |
| 54790_11_1068 | TET2 | EXON | − | chr4: 105275532-105275552 | GGCUGGUAAAGUGUAUGGAU | 1087 |
| 54790_11_1069 | TET2 | EXON | − | chr4: 105275533-105275553 | UGGCUGGUAAAGUGUAUGGA | 1088 |
| 54790_11_1072 | TET2 | EXON | − | chr4: 105275537-105275557 | ACCUUGGCUGGUAAAGUGUA | 1089 |
| 54790_11_1075 | TET2 | EXON | − | chr4: 105275549-105275569 | GGCUAUUUCCAAACCUUGGC | 1090 |
| 54790_11_1076 | TET2 | EXON | − | chr4: 105275553-105275573 | CUCUGGCUAUUUCCAAACCU | 1091 |
| 54790_11_1079 | TET2 | EXON | − | chr4: 105275570-105275590 | AGUAUUUAGAUGUAAAACUC | 1092 |
| 54790_11_1085 | TET2 | EXON | − | chr4: 105275606-105275626 | AACCAUCUCCCUGCAUAUUU | 1093 |
| 54790_11_1089 | TET2 | EXON | − | chr4: 105275641-105275661 | AUGAUGUACAUUUGGUCUAA | 1094 |
| 54790_11_1092 | TET2 | EXON | − | chr4: 105275649-105275669 | UUCCCUACAUGAUGUACAUU | 1095 |
| 54790_11_1093 | TET2 | EXON | − | chr4: 105275676-105275696 | AUCUCAUGAGUGGGAUAAGG | 1096 |
| 54790_11_1095 | TET2 | EXON | − | chr4: 105275679-105275699 | UCCAUCUCAUGAGUGGGAUA | 1097 |
| 54790_11_1097 | TET2 | EXON | − | chr4: 105275685-105275705 | UGGCCAUCCAUCUCAUGAGU | 1098 |
| 54790_11_1098 | TET2 | EXON | − | chr4: 105275686-105275706 | GUGGCCAUCCAUCUCAUGAG | 1099 |
| 54790_11_1102 | TET2 | EXON | − | chr4: 105275705-105275725 | UAGAGGUGGCUCCCAUGAAG | 1100 |
| 54790_11_1105 | TET2 | EXON | − | chr4: 105275719-105275739 | AUUGGGUGGUAAUCUAGAGG | 1101 |
| 54790_11_1107 | TET2 | EXON | − | chr4: 105275722-105275742 | CAGAUUGGGUGGUAAUCUAG | 1102 |
| 54790_11_1111 | TET2 | EXON | − | chr4: 105275733-105275753 | UUUGGAUUGCUCAGAUUGGG | 1103 |
| 54790_11_1112 | TET2 | EXON | − | chr4: 105275736-105275756 | AUGUUUGGAUUGCUCAGAUU | 1104 |
| 54790_11_1113 | TET2 | EXON | − | chr4: 105275737-105275757 | CAUGUUUGGAUUGCUCAGAU | 1105 |
| 54790_11_1120 | TET2 | EXON | − | chr4: 105275751-105275771 | CCAUUUUUAUAGUCCAUGUU | 1106 |
| 54790_11_1125 | TET2 | EXON | − | chr4: 105275787-105275807 | UAGUUAUGGAUUAUGUGAGA | 1107 |
| 54790_11_1129 | TET2 | EXON | − | chr4: 105275801-105275821 | CCGGAGCUGCACUGUAGUUA | 1108 |
| 54790_11_1133 | TET2 | EXON | − | chr4: 105275820-105275840 | AGAGAGCUGUUGAACAUGCC | 1109 |
| 54790_11_1144 | TET2 | EXON | − | chr4: 105275848-105275868 | CUCCUUGUUUUGGAGAUGCA | 1110 |
| 54790_11_1145 | TET2 | EXON | − | chr4: 105275849-105275869 | UCUCCUUGUUUUGGAGAUGC | 1111 |
| 54790_11_1148 | TET2 | EXON | − | chr4: 105275858-105275878 | GCAUGUCAUUCUCCUUGUUU | 1112 |
| 54790_11_1154 | TET2 | EXON | − | chr4: 105275884-105275904 | UGAUAACCCAUUAGCUGUGU | 1113 |
| 54790_11_1155 | TET2 | EXON | − | chr4: 105275885-105275905 | UUGAUAACCCAUUAGCUGUG | 1114 |
| 54790_11_1161 | TET2 | EXON | − | chr4: 105275916-105275936 | GUUCUAUCAUGGUUAAGAGC | 1115 |
| 54790_11_1165 | TET2 | EXON | − | chr4: 105275927-105275947 | GGACACAAGCAGUUCUAUCA | 1116 |
| 54790_11_1169 | TET2 | EXON | − | chr4: 105275948-105275968 | UUAAUUUGUGUAAGCCUCCU | 1117 |
| 54790_11_1175 | TET2 | EXON | − | chr4: 105275997-105276017 | ACACCCUGGACUAGUGCCAA | 1118 |
| 54790_11_1176 | TET2 | EXON | − | chr4: 105276011-105276031 | CUGCACCAGAAGCCACACCC | 1119 |
| 54790_11_1182 | TET2 | EXON | − | chr4: 105276081-105276101 | ACGGCCACUCCCCCAAUGUC | 1120 |
| 54790_11_1186 | TET2 | EXON | − | chr4: 105276100-105276120 | UGACCCAUGAGUUGGAGCCA | 1121 |
| 54790_11_1188 | TET2 | EXON | − | chr4: 105276108-105276128 | AUGAGAAUUGACCCAUGAGU | 1122 |
| 54790_11_1200 | TET2 | EXON | − | chr4: 105276157-105276177 | GGGAUUCUUUAAAGGGGUUG | 1123 |
| 54790_11_1202 | TET2 | EXON | − | chr4: 105276163-105276183 | CCUAUUGGGAUUCUUUAAAG | 1124 |
| 54790_11_1203 | TET2 | EXON | − | chr4: 105276164-105276184 | UCCUAUUGGGAUUCUUUAAA | 1125 |
| 54790_11_1205 | TET2 | EXON | − | chr4: 105276165-105276185 | UUCCUAUUGGGAUUCUUUAA | 1126 |
| 54790_11_1207 | TET2 | EXON | − | chr4: 105276177-105276197 | CUGGUGGGGUGAUUCCUAUU | 1127 |
| 54790_11_1209 | TET2 | EXON | − | chr4: 105276178-105276198 | CCUGGUGGGGUGAUUCCUAU | 1128 |
| 54790_11_1211 | TET2 | EXON | − | chr4: 105276191-105276211 | AGACGAGGGAGAUCCUGGUG | 1129 |
| 54790_11_1212 | TET2 | EXON | − | chr4: 105276192-105276212 | AAGACGAGGGAGAUCCUGGU | 1130 |
| 54790_11_1214 | TET2 | EXON | − | chr4: 105276193-105276213 | AAAGACGAGGGAGAUCCUGG | 1131 |
| 54790_11_1216 | TET2 | EXON | − | chr4: 105276196-105276216 | GUAAAAGACGAGGGAGAUCC | 1132 |
| 54790_11_1219 | TET2 | EXON | − | chr4: 105276205-105276225 | CUUAUGCUGGUAAAAGACGA | 1133 |
| 54790_11_1221 | TET2 | EXON | − | chr4: 105276206-105276226 | UCUUAUGCUGGUAAAAGACG | 1134 |
| 54790_11_1228 | TET2 | EXON | − | chr4: 105276218-105276238 | GCUCAUUCAUGCUCUUAUGC | 1135 |
| 54790_11_1230 | TET2 | EXON | − | chr4: 105276240-105276260 | CAAAGAGCCAAGCCAUGUUU | 1136 |
| 54790_11_1241 | TET2 | EXON | − | chr4: 105276268-105276288 | ACGGGCUUUUUCAGCCAUUU | 1137 |
| 54790_11_1246 | TET2 | EXON | − | chr4: 105276286-105276306 | ACACUCUUCCUCUUUCUCAC | 1138 |
| 54790_11_1247 | TET2 | EXON | − | chr4: 105276287-105276307 | CACACUCUUCCUCUUUCUCA | 1139 |
| 54790_11_1251 | TET2 | EXON | − | chr4: 105276320-105276340 | AUUUCUGAGGCACAUAGUCU | 1140 |
| 54790_11_1252 | TET2 | EXON | − | chr4: 105276321-105276341 | GAUUUCUGAGGCACAUAGUC | 1141 |
| 54790_11_1260 | TET2 | EXON | − | chr4: 105276333-105276353 | UUUUUGCCAUGGGAUUUCUG | 1142 |
| 54790_11_1263 | TET2 | EXON | − | chr4: 105276343-105276363 | CCGUUUCACUUUUUUGCCAU | 1143 |
| 54790_11_1265 | TET2 | EXON | − | chr4: 105276344-105276364 | CCCGUUUCACUUUUUUGCCA | 1144 |
| 54790_11_1269 | TET2 | EXON | − | chr4: 105276369-105276389 | GAAGUUUCAUGUGGCUCAGC | 1145 |
| 54790_11_1270 | TET2 | EXON | − | chr4: 105276378-105276398 | GUGGGCUCUGAAGUUUCAUG | 1146 |
| 54790_11_1273 | TET2 | EXON | − | chr4: 105276396-105276416 | UUGAUGAAACGCAGGUAAGU | 1147 |
| 54790_11_1274 | TET2 | EXON | − | chr4: 105276397-105276417 | CUUGAUGAAACGCAGGUAAG | 1148 |
| 54790_11_1277 | TET2 | EXON | − | chr4: 105276404-105276424 | CAAGAGACUUGAUGAAACGC | 1149 |
| 54790_11_1281 | TET2 | EXON | − | chr4: 105276427-105276447 | GGUCACGGACAUGGUCCUUU | 1150 |
| 54790_11_1282 | TET2 | EXON | − | chr4: 105276436-105276456 | GGAGUCUGUGGUCACGGACA | 1151 |
| 54790_11_1284 | TET2 | EXON | − | chr4: 105276442-105276462 | UACUGUGGAGUCUGUGGUCA | 1152 |
| 54790_11_1286 | TET2 | EXON | − | chr4: 105276448-105276468 | UGUAGUUACUGUGGAGUCUG | 1153 |
| 54790_11_1288 | TET2 | EXON | − | chr4: 105276457-105276477 | AUAUGGAGAUGUAGUUACUG | 1154 |
| 54790_11_1290 | TET2 | EXON | − | chr4: 105276474-105276494 | GUGACCCGAGUGAAGGCAUA | 1155 |
| 54790_11_1294 | TET2 | EXON | − | chr4: 105276481-105276501 | AGGCCCUGUGACCCGAGUGA | 1156 |
| 54790_11_1297 | TET2 | EXON | − | chr4: 105276501-105276521 | UAUCAUAUAUAUCUGUUGUA | 1157 |
| 54790_11_1300 | TET2 | EXON | − | chr4: 105276527-105276547 | GUGAGGUAACCAACAAAAGG | 1158 |
| 54790_11_1301 | TET2 | EXON | − | chr4: 105276528-105276548 | AGUGAGGUAACCAACAAAAG | 1159 |
| 54790_11_1303 | TET2 | EXON | − | chr4: 105276529-105276549 | AAGUGAGGUAACCAACAAAA | 1160 |
| 54790_11_1305 | TET2 | EXON | − | chr4: 105276530-105276550 | CAAGUGAGGUAACCAACAAA | 1161 |
| 54790_11_1310 | TET2 | EXON | − | chr4: 105276544-105276564 | GGUUGUGGUCUUUUCAAGUG | 1162 |
| 54790_11_1312 | TET2 | EXON | − | chr4: 105276559-105276579 | UACUACUGACAGGUUGGUUG | 1163 |
| 54790_11_1313 | TET2 | EXON | − | chr4: 105276565-105276585 | GAACUAUACUACUGACAGGU | 1164 |
| 54790_11_1314 | TET2 | EXON | − | chr4: 105276569-105276589 | AUGAGAACUAUACUACUGAC | 1165 |
| 54790_11_1331 | TET2 | EXON | − | chr4: 105276646-105276666 | CUUUUGUUGCUGGUGAGCUG | 1166 |
| 54790_11_1334 | TET2 | EXON | − | chr4: 105276656-105276676 | AAGAUAACCUCUUUUGUUGC | 1167 |
| 54790_11_1336 | TET2 | EXON | − | chr4: 105276680-105276700 | CCAGUGAAAAUUAAGUGCUA | 1168 |
| 54790_11_1339 | TET2 | EXON | − | chr4: 105276705-105276725 | GAUGCCAUCUGUGACCACUU | 1169 |
| 54790_11_1344 | TET2 | EXON | − | chr4: 105276706-105276726 | AGAUGCCAUCUGUGACCACU | 1170 |
| 54790_11_1354 | TET2 | EXON | − | chr4: 105276738-105276758 | UCUUUUUGCAUAGAAUGCUU | 1171 |
| 54790_11_1363 | TET2 | EXON | − | chr4: 105276780-105276800 | GUGUUUAAAAAUGUAAAUUG | 1172 |
| 54790_11_1370 | TET2 | EXON | − | chr4: 105276841-105276861 | AGAGUUGUAAGCGGGGGGGG | 1173 |
| 54790_11_1371 | TET2 | EXON | − | chr4: 105276842-105276862 | UAGAGUUGUAAGCGGGGGGG | 1174 |
| 54790_11_1374 | TET2 | EXON | − | chr4: 105276843-105276863 | GUAGAGUUGUAAGCGGGGGG | 1175 |
| 54790_11_1376 | TET2 | EXON | − | chr4: 105276844-105276864 | UGUAGAGUUGUAAGCGGGGG | 1176 |
| 54790_11_1378 | TET2 | EXON | − | chr4: 105276845-105276865 | GUGUAGAGUUGUAAGCGGGG | 1177 |
| 54790_11_1379 | TET2 | EXON | − | chr4: 105276846-105276866 | UGUGUAGAGUUGUAAGCGGG | 1178 |
| 54790_11_1382 | TET2 | EXON | − | chr4: 105276847-105276867 | AUGUGUAGAGUUGUAAGCGG | 1179 |
| 54790_11_1383 | TET2 | EXON | − | chr4: 105276848-105276868 | GAUGUGUAGAGUUGUAAGCG | 1180 |
| 54790_11_1386 | TET2 | EXON | − | chr4: 105276849-105276869 | AGAUGUGUAGAGUUGUAAGC | 1181 |
| 54790_11_1388 | TET2 | EXON | − | chr4: 105276850-105276870 | CAGAUGUGUAGAGUUGUAAG | 1182 |
| 54790_11_1394 | TET2 | EXON | − | chr4: 105276876-105276896 | AAACUUGAUAUUAUUAAAAG | 1183 |
| 54790_11_1406 | TET2 | EXON | − | chr4: 105276963-105276983 | AUCAUAUAUUCAGCACCAGA | 1184 |
| 54790_11_1440 | TET2 | EXON | − | chr4: 105277160-105277180 | AUAGCAUCUUGAUGAUAUAA | 1185 |
| 54790_11_1444 | TET2 | EXON | − | chr4: 105277192-105277212 | CCCCUAUUAUUCAAGGGCAC | 1186 |
| 54790_11_1446 | TET2 | EXON | − | chr4: 105277198-105277218 | AAGGUACCCCUAUUAUUCAA | 1187 |
| 54790_11_1447 | TET2 | EXON | − | chr4: 105277199-105277219 | AAAGGUACCCCUAUUAUUCA | 1188 |
| 54790_11_1451 | TET2 | EXON | − | chr4: 105277217-105277237 | UGAUAAAAACUUGAAUGAAA | 1189 |
| 54790_11_1457 | TET2 | EXON | − | chr4: 105277246-105277266 | AACUAAGCUUGUGUAAGAAU | 1190 |
| 54790_11_1463 | TET2 | EXON | − | chr4: 105277293-105277313 | ACUGGAUGAGCAAAAUCCAG | 1191 |
| 54790_11_1469 | TET2 | EXON | − | chr4: 105277311-105277331 | UUGUCCUACAAGGACUUCAC | 1192 |
| 54790_11_1471 | TET2 | EXON | − | chr4: 105277321-105277341 | AUAUCGUUUAUUGUCCUACA | 1193 |
| 54790_11_1478 | TET2 | EXON | − | chr4: 105277432-105277452 | UGUUCAAGUUGUCAAAGCUU | 1194 |
| 54790_11_1501 | TET2 | EXON | − | chr4: 105277563-105277583 | AUUGCUCAUCAGCAGAUGCA | 1195 |
| 54790_11_1505 | TET2 | EXON | − | chr4: 105277591-105277611 | UUAACUGGCUGUGUUAAAAA | 1196 |
| 54790_11_1507 | TET2 | EXON | − | chr4: 105277606-105277626 | AGCCCCAUGGUGGAUUUAAC | 1197 |
| 54790_11_1509 | TET2 | EXON | − | chr4: 105277616-105277636 | GAAUCCAGUAAGCCCCAUGG | 1198 |
| 54790_11_1512 | TET2 | EXON | − | chr4: 105277619-105277639 | CUUGAAUCCAGUAAGCCCCA | 1199 |
| 54790_11_1517 | TET2 | EXON | − | chr4: 105277655-105277675 | GCACCAGAAAACAUGUUUUG | 1200 |
| 54790_11_1547 | TET2 | EXON | − | chr4: 105277827-105277847 | UAUGAUCCAUAAAAUAGCAU | 1201 |
| 54790_11_1553 | TET2 | EXON | − | chr4: 105277879-105277899 | GUACAUAAUUAUCAACACAA | 1202 |
| 54790_11_1558 | TET2 | EXON | − | chr4: 105277934-105277954 | GCUCAAUCCUCUUGUUAAAG | 1203 |
| 54790_11_1565 | TET2 | EXON | − | chr4: 105277966-105277986 | CCUGUUUAUUCAUCUUAUGC | 1204 |
| 54790_11_1574 | TET2 | EXON | − | chr4: 105277996-105278016 | UUUUAACUGACAGAUUCACA | 1205 |
| 54790_11_1613 | TET2 | EXON | − | chr4: 105278246-105278266 | CAUUAUGAUAUAUUUGUAGC | 1206 |
| 54790_11_1621 | TET2 | EXON | − | chr4: 105278304-105278324 | UGUUGAGGUAUAUGACAAGU | 1207 |
| 54790_11_1624 | TET2 | EXON | − | chr4: 105278319-105278339 | CUAUUGCCAAACUAGUGUUG | 1208 |
| 54790_11_1630 | TET2 | EXON | − | chr4: 105278373-105278393 | AAGGACUUGGAAAAAAAUGA | 1209 |
| 54790_11_1636 | TET2 | EXON | − | chr4: 105278386-105278406 | UAACAAUAAAAAAAAGGACU | 1210 |
| 54790_11_1643 | TET2 | EXON | − | chr4: 105278392-105278412 | UUUUUUUAACAAUAAAAAAA | 1211 |
| 54790_11_1647 | TET2 | EXON | − | chr4: 105278423-105278443 | AGAAAUCAAGUAUUGAAAAA | 1212 |
| 54790_11_1658 | TET2 | EXON | − | chr4: 105278470-105278490 | CCUGAAUUUUUAGAACAAAA | 1213 |
| 54790_11_1667 | TET2 | EXON | − | chr4: 105278513-105278533 | ACAGGUGACAUGUUGGCAUA | 1214 |
| 54790_11_1669 | TET2 | EXON | − | chr4: 105278514-105278534 | CACAGGUGACAUGUUGGCAU | 1215 |
| 54790_11_1674 | TET2 | EXON | − | chr4: 105278520-105278540 | CAUAAACACAGGUGACAUGU | 1216 |
| 54790_11_1675 | TET2 | EXON | − | chr4: 105278531-105278551 | CAACAAUUUUACAUAAACAC | 1217 |
| 54790_11_1682 | TET2 | EXON | − | chr4: 105278589-105278609 | AGAAGGGAUUCAAAAUAAAA | 1218 |
| 54790_11_1683 | TET2 | EXON | − | chr4: 105278590-105278610 | UAGAAGGGAUUCAAAAUAAA | 1219 |
| 54790_11_1685 | TET2 | EXON | − | chr4: 105278605-105278625 | CAUGUACAAGUAAAAUAGAA | 1220 |
| 54790_11_1687 | TET2 | EXON | − | chr4: 105278606-105278626 | ACAUGUACAAGUAAAAUAGA | 1221 |
| 54790_11_1733 | TET2 | EXON | − | chr4: 105278813-105278833 | GAGAGUUACAAGUAAGUCUC | 1222 |
| 54790_11_1739 | TET2 | EXON | − | chr4: 105278855-105278875 | UAUGUACCUUCAGUGAUUAC | 1223 |
| 54790_11_1746 | TET2 | EXON | − | chr4: 105278880-105278900 | CUGUUUAAGGGAAGUCCACA | 1224 |
| 54790_11_1749 | TET2 | EXON | − | chr4: 105278892-105278912 | GUAGGUGUUUGCCUGUUUAA | 1225 |
| 54790_11_1751 | TET2 | EXON | − | chr4: 105278893-105278913 | UGUAGGUGUUUGCCUGUUUA | 1226 |
| 54790_11_1754 | TET2 | EXON | − | chr4: 105278910-105278930 | CUGUUGCACACCAUACCUGU | 1227 |
| 54790_11_1758 | TET2 | EXON | − | chr4: 105278953-105278973 | UAGUAAGCAAAAAUGUAUUU | 1228 |
| 54790_11_1768 | TET2 | EXON | − | chr4: 105279007-105279027 | AUUUGACCAAUAAAACCCAA | 1229 |
| 54790_11_1784 | TET2 | EXON | − | chr4: 105279084-105279104 | UUUUGGAAAUGUUUGCAAAU | 1230 |
| 54790_11_1789 | TET2 | EXON | − | chr4: 105279101-105279121 | GUAAGCAAAGCAAACAUUUU | 1231 |
| 54790_11_1792 | TET2 | EXON | − | chr4: 105279127-105279147 | CAAAAAACAUUAAAAUCAUG | 1232 |
| 54790_11_1796 | TET2 | EXON | − | chr4: 105279154-105279174 | AUGUUUGGGGCUAGAUAUUA | 1233 |
| 54790_11_1797 | TET2 | EXON | − | chr4: 105279167-105279187 | AUGUAGUAAUCAAAUGUUUG | 1234 |
| 54790_11_1798 | TET2 | EXON | − | chr4: 105279168-105279188 | CAUGUAGUAAUCAAAUGUUU | 1235 |
| 54790_11_1800 | TET2 | EXON | − | chr4: 105279169-105279189 | ACAUGUAGUAAUCAAAUGUU | 1236 |
| 54790_11_1803 | TET2 | EXON | − | chr4: 105279212-105279232 | CAGAAAUCAAAUAUUAAGAA | 1237 |
| 54790_11_1809 | TET2 | EXON | − | chr4: 105279240-105279260 | GCAGUUUAACAAAUGACAGU | 1238 |
| 54790_11_1814 | TET2 | EXON | − | chr4: 105279266-105279286 | ACUAUACUUCCUGUUCUUGU | 1239 |
| 54790_11_1832 | TET2 | EXON | − | chr4: 105279376-105279396 | CCAUUCAUUCUAACUGAGGC | 1240 |
| 54790_11_1833 | TET2 | EXON | − | chr4: 105279380-105279400 | CUUUCCAUUCAUUCUAACUG | 1241 |
| 54790_11_1841 | TET2 | EXON | − | chr4: 105279449-105279469 | CUCAGAAGCAUUUUCAAGUA | 1242 |
| 54790_11_1877 | TET2 | EXON | − | chr4: 105279748-105279768 | AACACUCACAUAGCAUUAUC | 1243 |

[0190] TALEN Gene Editing Systems

[0191] TALENs are produced artificially by fusing a TAL effector DNA binding domain to a DNA cleavage domain. Transcription activator-like effects (TALEs) can be engineered to bind any desired DNA sequence, including a portion of the HLA or TCR gene. By combining an engineered TALE with a DNA cleavage domain, a restriction enzyme can be produced which is specific to any desired DNA sequence, including a HLA or TCR sequence. These can then be introduced into a cell, wherein they can be used for genome editing. Boch (2011) Nature Biotech. 29: 135-6; and Boch et al. (2009) Science 326: 1509-12; Moscou et al. (2009) Science 326: 3501.

[0192] TALEs are proteins secreted by Xanthomonas bacteria. The DNA binding domain contains a repeated, highly conserved 33-34 amino acid sequence, with the exception of the 12th and 13th amino acids. These two positions are highly variable, showing a strong correlation with specific nucleotide recognition. They can thus be engineered to bind to a desired DNA sequence.

[0193] To produce a TALEN, a TALE protein is fused to a nuclease (N), which is, for example, a wild-type or mutated FokI endonuclease. Several mutations to FokI have been made for its use in TALENs; these, for example, improve cleavage specificity or activity. Cermak et al. (2011) Nucl. Acids Res. 39: e82; Miller et al. (2011) Nature Biotech. 29: 143-8; Hockemeyer et al. (2011) Nature Biotech. 29: 731-734; Wood et al. (2011) Science 333: 307; Doyon et al. (2010) Nature Methods 8: 74-79; Szczepek et al. (2007) Nature Biotech. 25: 786-793; and Guo et al. (2010) J. Mol. Biol. 200: 96.

[0194] The FokI domain functions as a dimer, requiring two constructs with unique DNA binding domains for sites in the target genome with proper orientation and spacing. Both the number of amino acid residues between the TALE DNA binding domain and the FokI cleavage domain and the number of bases between the two individual TALEN binding sites appear to be important parameters for achieving high levels of activity. Miller et al. (2011) Nature Biotech. 29: 143-8.

[0195] A Tet, e.g., Tet1, Tet2 and/or Tet3, e.g., Tet2, TALEN can be used inside a cell to produce a double-stranded break (DSB). A mutation can be introduced at the break site if the repair mechanisms improperly repair the break via non-homologous end joining. For example, improper repair may introduce a frame shift mutation. Alternatively, foreign DNA can be introduced into the cell along with the TALEN, e.g., DNA encoding a CAR, e.g., as described herein; depending on the sequences of the foreign DNA and chromosomal sequence, this process can be used to integrate the DNA encoding the CAR, e.g., as described herein, at or near the site targeted by the TALEN. As shown herein, in the examples, but without being bound by theory, such integration may lead to the expression of the CAR as well as disruption of the Tet, e.g., Tet1, Tet2 and/or Tet3, e.g., Tet2, gene. Such foreign DNA molecule is referred to herein as “template DNA.” In embodiments, the template DNA further comprises homology arms 5′ to, 3′ to, or both 5′ and 3′ to the nucleic acid of the template DNA which encodes the molecule or molecules of interest (e.g., which encodes a CAR described herein), wherein said homology arms are complementary to genomic DNA sequence flanking the target sequence.

[0196] TALENs specific to sequences in Tet, e.g., Tet1, Tet2 and/or Tet3, e.g., Tet2, can be constructed using any method known in the art, including various schemes using modular components. Zhang et al. (2011) Nature Biotech. 29: 149-53; Geibler et al. (2011) PLoS ONE 6: e19509; U.S. Pat. Nos. 8,420,782; 8,470,973, the contents of which are hereby incorporated by reference in their entirety.

[0197] Zinc Finger Nuclease to Inhibit Tet, e.g., Tet1, Tet2 and/or Tet3, e.g., Tet2

[0198] “ZFN” or “Zinc Finger Nuclease” refer to a zinc finger nuclease, an artificial nuclease which can be used to modify, e.g., delete one or more nucleic acids of, a desired nucleic acid sequence, e.g., Tet, e.g., Tet1, Tet2 and/or Tet3, e.g., Tet2.

[0199] Like a TALEN, a ZFN comprises a FokI nuclease domain (or derivative thereof) fused to a DNA-binding domain. In the case of a ZFN, the DNA-binding domain comprises one or more zinc fingers. Carroll et al. (2011) Genetics Society of America 188: 773-782; and Kim et al. (1996) Proc. Natl. Acad. Sci. USA 93: 1156-1160.

[0200] A zinc finger is a small protein structural motif stabilized by one or more zinc ions. A zinc finger can comprise, for example, Cys2His2, and can recognize an approximately 3-bp sequence. Various zinc fingers of known specificity can be combined to produce multi-finger polypeptides which recognize about 6, 9, 12, 15 or 18-bp sequences. Various selection and modular assembly techniques are available to generate zinc fingers (and combinations thereof) recognizing specific sequences, including phage display, yeast one-hybrid systems, bacterial one-hybrid and two-hybrid systems, and mammalian cells.

[0201] Like a TALEN, a ZFN must dimerize to cleave DNA. Thus, a pair of ZFNs are required to target non-palindromic DNA sites. The two individual ZFNs must bind opposite strands of the DNA with their nucleases properly spaced apart. Bitinaite et al. (1998) Proc. Natl. Acad. Sci. USA 95: 10570-5.

[0202] Also like a TALEN, a ZFN can create a double-stranded break in the DNA, which can create a frame-shift mutation if improperly repaired, leading to a decrease in the expression and amount of Tet, e.g., Tet1, Tet2 and/or Tet3, e.g., Tet2, in a cell. ZFNs can also be used with homologous recombination to mutate the Tet, e.g., Tet1, Tet2 and/or Tet3, e.g., Tet2, gene, or to introduce nucleic acid encoding a CAR at a site at or near the targeted sequence. As discussed above, the nucleci acid encoding a CAR may be introduced as part of a template DNA. In embodiments, the template DNA further comprises homology arms 5′ to, 3′ to, or both 5′ and 3′ to the nucleic acid of the template DNA which encodes the molecule or molecules of interest (e.g., which encodes a CAR described herein), wherein said homology arms are complementary to genomic DNA sequence flanking the target sequence.

[0203] ZFNs specific to sequences in the Tet, e.g., Tet1, Tet2 and/or Tet3, e.g., Tet2, gene can be constructed using any method known in the art. See, e.g., Provasi (2011) Nature Med. 18: 807-815; Torikai (2013) Blood 122: 1341-1349; Cathomen et al. (2008) Mol. Ther. 16: 1200-7; and Guo et al. (2010) J. Mol. Biol. 400: 96; U.S. Patent Publication 2011/0158957; and U.S. Patent Publication 2012/0060230, the contents of which are hereby incorporated by reference in their entirety. In embodiments, The ZFN gene editing system may also comprise nucleic acid encoding one or more components of the ZFN gene editing system, e.g., a ZFN gene editing system targeted to Tet, e.g., Tet1, Tet2 and/or Tet3, e.g., Tet2.

[0204] Without being bound by theory, it is believed that use of gene editing systems (e.g., CRISPR/Cas gene editing systems) which target Tet, e.g., Tet1, Tet2, and/or Tet3, e.g., Tet2, may allow one to inhibit one or more functions of Tet, e.g., Tet1, Tet2, and/or Tet3, e.g., Tet2, by, for example, causing an editing event which results in expression of a truncated Tet, e.g., Tet1, Tet2, and/or Tet3, e.g., Tet2. Again, without being bound by theory, such truncated Tet, e.g., Tet1, Tet2, and/or Tet3, e.g., Tet2 proteins may preserve one or more functions of the Tet, e.g., Tet1, Tet2, and/or Tet3, e.g., Tet2 (e.g., a scaffolding function), while inhibiting one or more other functions of the Tet, e.g., Tet1, Tet2, and/or Tet3, e.g., Tet2 (e.g., a catalytic function), and as such, may be preferable. Gene editing systems which target a late exon or intron of a Tet gene, e.g., Tet1, Tet2, and/or Tet3 gene, e.g., Tet2 gene, may be particularly preferred in this regard. In an aspect, the gene editing system Tet inhibitor, e.g., Tet1, Tet2, and/or Tet3 inhibitor, e.g., Tet2 inhibitor of the invention targets a late exon or intron of the tet gene. In an aspect, the gene editing system Tet inhibitor, e.g., Tet1, Tet2, and/or Tet3 inhibitor, e.g., Tet2 inhibitor of the invention targets an exon or intron downstream of exon 8. In an aspect, the gene editing system Tet inhibitor, e.g., Tet1, Tet2, and/or Tet3 inhibitor, e.g., Tet2 inhibitor, targets exon 8 or exon 9, e.g., exon 9, of the tet2 gene.

[0205] Without being bound by theory, it may also be preferable in other embodiments to target an early exon or intron of Tet gene, e.g., Tet1, Tet2, and/or Tet3 gene, e.g., Tet2 gene, for example, to introduce a premature stop codon in the targeted gene which results in no expression of the gene product, or expression of a completely non-functional gene product. Gene editing systems which target an early exon or intron of a Tet gene, e.g., Tet1, Tet2, and/or Tet3 gene, e.g., Tet2 gene, may be particularly preferred in this regard. In an aspect, the gene editing system Tet inhibitor, e.g., Tet1, Tet2, and/or Tet3 inhibitor, e.g., Tet2 inhibitor of the invention targets an early exon or intron of the tet gene. In an aspect, the gene editing system Tet inhibitor, e.g., Tet1, Tet2, and/or Tet3 inhibitor, e.g., Tet2 inhibitor of the invention targets an exon or intron upstream of exon 4. In embodiments, the gene editing system Tet inhibitor, e.g., Tet1, Tet2, and/or Tet3 inhibitor, e.g., Tet2 inhibitor, targets exon 1, exon 2, or exon 3, e.g., exon 3, of the tet2 gene.

[0206] Without being bound by theory, it may also be preferable in other embodiments to target a sequence of a Tet gene, e.g., Tet1, Tet2, and/or Tet3 gene, e.g., Tet2 gene, that is specific to one or more isoforms of the tet (e.g., tet2 gene) but does not affect one or more other isoforms of the tet (e.g., tet2). In embodiments, it may be preferable to specifically target isoforms of the tet (e.g., tet2) which contain a catalytic domain.

[0207] dsRNA, e.g., siRNA or shRNA, Inhibitors of Tet, e.g., Tet1, Tet2 and/or Tet3, e.g., Tet2

[0208] According to the present invention, double stranded RNA (“dsRNA”), e.g., siRNA or shRNA can be used as Tet, e.g., Tet1, Tet2 and/or Tet3, e.g., Tet2, inhibitors. Also contemplated by the present invention are the uses of nucleic acid encoding said dsRNA Tet, e.g., Tet1, Tet2 and/or Tet3, e.g., Tet2, inhibitors.

[0209] In an embodiment, the Tet, e.g., Tet1, Tet2 and/or Tet3, e.g., Tet2, inhibitor is a nucleic acid, e.g., a dsRNA, e.g., a siRNA or shRNA specific for nucleic acid encoding Tet, e.g., Tet1, Tet2 and/or Tet3, e.g., Tet2, e.g., genomic DNA or mRNA encoding Tet, e.g., Tet1, Tet2 and/or Tet3, e.g., Tet2.

[0210] An aspect of the invention provides a composition comprising a dsRNA, e.g., a siRNA or shRNA, comprising at least 15 contiguous nucleotides, e.g., 15, 16, 17, 18, 19, 20, 21, 22, 23, 24 or 25 contiguous nucleotides, e.g., 21 contiguous nucleotides, which are complementary (e.g., 100% complementary) to a sequence of a Tet, e.g., Tet1, Tet2 and/or Tet3, e.g., Tet2, nucleic acid sequence (e.g., genomic DNA or mRNA encoding Tet, e.g., Tet1, Tet2 and/or Tet3, e.g., Tet2). In embodiments, the at least 15 contiguous nucleotides, e.g., 15, 16, 17, 18, 19, 20, 21, 22, 23, 24 or 25 contiguous nucleotides, e.g., 21 contiguous nucleotides, include contiguous nucleotides of a Target sequence of shRNA or Nucleic Acid encoding Tet2 shRNA listed in table 4. It is understood that some of the target sequences and/or shRNA molecules are presented as DNA, but the dsRNA agents targeting these sequences or comprising these sequences can be RNA, or any nucleotide, modified nucleotide or substitute disclosed herein and/or known in the art, provided that the molecule can still mediate RNA interference.

[0211] In an embodiment, a nucleic acid molecule that encodes a dsRNA molecule that inhibits expression of Tet, e.g., Tet1, Tet2 and/or Tet3, e.g., Tet2, is operably linked to a promoter, e.g., a H1- or a U6-derived promoter such that the dsRNA molecule that inhibits expression of Tet, e.g., Tet1, Tet2 and/or Tet3, e.g., Tet2, is expressed within a CAR-expressing cell. See e.g., Tiscornia G., “Development of Lentiviral Vectors Expressing siRNA,” Chapter 3, in Gene Transfer: Delivery and Expression of DNA and RNA (eds. Friedmann and Rossi). Cold Spring Harbor Laboratory Press, Cold Spring Harbor, N.Y., USA, 2007; Brummelkamp T R, et al. (2002) Science 296: 550-553; Miyagishi M, et al. (2002) Nat. Biotechnol. 19: 497-500. In an embodiment the nucleic acid molecule that encodes a dsRNA molecule that inhibits Tet, e.g., Tet1, Tet2 and/or Tet3, e.g., Tet2, is present on the same vector, e.g., a lentiviral vector, that comprises a nucleic acid molecule that encodes a component, e.g., all of the components, of the CAR. In such an embodiment, the nucleic acid molecule that encodes a dsRNA molecule that inhibits Tet, e.g., Tet1, Tet2 and/or Tet3, e.g., Tet2, is located on the vector, e.g., the lentiviral vector, 5′- or 3′- to the nucleic acid that encodes a component, e.g., all of the components, of the CAR. The nucleic acid molecule that encodes a dsRNA molecule that inhibits expression of Tet, e.g., Tet1, Tet2 and/or Tet3, e.g., Tet2, can be transcribed in the same or different direction as the nucleic acid that encodes a component, e.g., all of the components, of the CAR. In an embodiment the nucleic acid molecule that encodes a dsRNA molecule that inhibits expression of Tet, e.g., Tet1, Tet2 and/or Tet3, e.g., Tet2, is present on a vector other than the vector that comprises a nucleic acid molecule that encodes a component, e.g., all of the components, of the CAR. In an embodiment, the nucleic acid molecule that encodes a dsRNA molecule that inhibits expression of Tet, e.g., Tet1, Tet2 and/or Tet3, e.g., Tet2, is transiently expressed within a CAR-expressing cell. In an embodiment, the nucleic acid molecule that encodes a dsRNA molecule that inhibits expression of Tet, e.g., Tet1, Tet2 and/or Tet3, e.g., Tet2, is stably integrated into the genome of a CAR-expressing cell.

[0212] Examples of nucleic acid sequences that encode shRNA sequences are provided below. The Target Sequence refers to the sequence within the Tet2 genomic DNA (or surrounding DNA). The nucleic acid encoding Tet2 shRNA encodes shRNA molecules useful in the present invention. In embodiments, the Tet2 inhibitor is an siRNA or shRNA specific for a Target sequence listed below, or specific for its mRNA complement. In embodiments, the Tet2 inhibitor is a shRNA encoded by the Nucleic Acid encoding Tet2 shRNA of the table 4 below. In embodiments, the Tet2 inhibitor is nucleic acid comprising by the Nucleic Acid encoding Tet2 shRNA of the table 4 below, e.g., which is under the control of a U6 or H1 promoter such that a Tet2 shRNA is produced. In embodiments, the invention provides a siRNA or shRNA comprising sequence which is the RNA analog (i.e., all T nucleic acid residues replaced with U nucleic acid residues) of the Target sequence of shRNA, e.g., the Target sequence of shRNA of any of the shRNAs of Table 4.

TABLE 4

| | | Target sequence | |
|---|---|---|---|
| | SHRNA_NAME | of shRNA | Nucleic Acid encoding Tet2 shRNA |
| TET2 | TET2- | CACATGGCGTTTA | CACATGGCGTTTATCCAGAAT |
| | 3838_76472_insert | TCCAGAAT (SEQ | CTCGAGATTCTGGATAAACGCCATGT |
| | (TET2 shRNA #1) | ID NO: 1244) | GTTTTTTGAATTCGCACCAGCACGCT |
| | | | ACGCACACACAGTACACACACTGACG |
| | | | TTTCGCCGTCTTC (SEQ ID NO: 1253) |
| TET2 | TET2_NM_017628.4_25616_concept | CAGATGCACAGGC | GAAGACGCACCGGCAGATGTACAGG |
| | (TET2 shRNA #2) | CAATTAAG (SEQ | CTAATTAAGGTTAATATTCATAGCCTT |
| | | ID NO: 1245) | AATTGGCCTGTGCATCTGTTTTTTGAA |
| | | | TTCGCACCAGCACGCTACGCAACACG |
| | | | TCAACCAGTGTCAGTGTTTCGCCGT |
| | | | (SEQ ID NO: 1254) |
| TET2 | TET2_NM_017628.4_25625_concept | GAGCTGCTGAATT | GAAGACGCACCGGGAGCTGCTGAAT |
| | (TET2 shRNA #3) | CAACTAGA (SEQ | TCAATTAGAGTTAATATTCATAGCTCT |
| | | ID NO: 1246) | AGTTGAATTCAGCAGCTCTTTTTTGA |
| | | | ATTCGCACCAGCACGCTACGCATGCA |
| | | | GTCAACCAGTGTCAACCATTCGCCGT |
| | | | (SEQ ID NO: 1255) |
| TET2 | TET2- | CAGATCGCCATAA | CAGATCGCCATAACATAAATACTCGA |
| | 6571_76471_target | CATAAATA (SEQ ID | GTATTTATGTTATGGCGATCTGTTTTT |
| | (TET2 shRNA #4) | NO: 1247) | TGAATTCGCACCAGCACGCTACGCAT |
| | | | GACCAGTACACACACTGCATGTTCGC |
| | | | CGTCTTC (SEQ ID NO: 1256) |
| TET2 | TET2_NM_017628.4_25619_target | GACCATGGAGCAG | GAAGACGCACCGGGACCATGGAGTA |
| | (TET2 shRNA #5) | CATCTGAA (SEQ | GCATTTGAAGTTAATATTCATAGCTTC |
| | | ID NO: 1248) | AGATGCTGCTCCATGGTCTTTTTTGA |
| | | | ATTCGCACCAGCACGCTACGCATGGT |
| | | | GTCAACCAGTGTCAGTTGTTCGCCGT |
| | | | (SEQ ID NO: 1257) |
| TET2 | TET2 shRNA #6 | GCCAAGTCATTATT | GCCAAGTCATTATTTGACCATCTCGA |
| | | TGACCAT (SEQ ID | GATGGTCAAATAATGACTTGGCTTTT |
| | | NO: 1249) | TTGA (SEQ ID NO: 1258) |
| TET2 | TET2 shRNA #7 | CCTCAGAGATATT | CCTCAGAGATATTGTGGGTTTCTCGA |
| | | GTGGGTTT (SEQ | GAAACCCACAATATCTCTGAGGTTTT |
| | | ID NO: 1250) | TTGA (SEQ ID NO: 1259) |
| TET2 | TET2 shRNA #8 | GGGTAAGCCAAGA | GGGTAAGCCAAGAAAGAAACTCGAG |
| | | AAGAAA (SEQ ID | TTTCTTTCTTGGCTTACCCTTTTTTGA |
| | | NO: 1251) | (SEQ ID NO: 1260) |
| TET2 | TET2 8 long | GGGTAAGCCAAGA | GAAGACGCACCGGGGGTAAGCCAAG |
| | (TET2 shRNA #9) | AAGAAA (SEQ ID | AAAGAAAGTTAATATTCATAGCTTTC |
| | | NO: 1252) | TTTCTTGGCTTACCCTTTTTTGAATTC |
| | | | GCACCAGCACGCTACGCAACACGTCA |
| | | | ACCAGTGTCAGTGTTTCGCCGT (SEQ |
| | | | ID NO: 1261) |

[0213] Additional dsRNA inhibitor of Tet2, e.g., shRNA and siRNA molecules can be designed and tested using methods known in the art and as described herein. In embodiments, the dsRNA Tet2 inhibitor, e.g., shRNA or siRNA, targets a sequence of SEQ TD NO: 1358. In embodiments, the dsRNA Tet2 inhibitor, e.g., shRNA or siRNA, targets a sequence of SEQ ID NO: 1359. In embodiments, the dsRNA Tet2 inhibitor, e.g., shRNA or siRNA, targets a sequence of SEQ ID NO: 1360. In embodiments, the dsRNA Tet2 inhibitor, e.g., shRNA or siRNA, targets a sequence of SEQ ID NO: 1361. In embodiments, the dsRNA Tet2 inhibitor, e.g., shRNA or siRNA, targets a sequence of SEQ ID NO: 1362. In embodiments, the dsRNA Tet2 inhibitor, e.g., shRNA or siRNA, targets a sequence of SEQ ID NO: 1363. In embodiments, the dsRNA Tet2 inhibitor, e.g., shRNA or siRNA, targets a sequence of an mRNA encoding Tet2.

[0214] In embodiments, the inhibitor is a nucleic acid, e.g., DNA, encoding a dsRNA Tet2 inhibitor, e.g., shRNA or siRNA, of any of the above embodiments. In embodiments, the nucleic acid, e.g., DNA, is disposed on a vector, e.g., any conventional expression system, e.g., as described herein, e.g., a lentiviral vector.

[0215] Without being bound by theory, a dsRNA TET inhibitor (e.g., siRNA or shRNA) which targets a sequence of a Tet mRNA, e.g., Tet1, Tet2, and/or Tet3 gene, e.g., Tet2 mRNA, that is specific to one or more isoforms of tet (e.g., tet2) but does not affect one or more other isoforms of tet (e.g., tet2) (for example, due to targeting a unique splice junction, or targeting a domain which is present in one or more isoforms of tet, e.g., tet2, but is not present in one or more other isoforms of tet, e.g., tet2). In embodiments, it may be preferable to specifically target isoforms of the tet (e.g., tet2) which contain a catalytic domain.

### Small Molecules

[0216] Tet Inhibitors

[0217] In embodiments, a Tet inhibitor is a small molecule that inhibits expression and/or a function of Tet, e.g., Tet1, Tet2 and/or Tet3, e.g., Tet2.

[0218] Tet2 Inhibitors

[0219] In embodiments, a Tet2 inhibitor is a small molecule that inhibits Tet2 expression and/or function. For example, a Tet2 inhibitor according to the present invention is 2-hydroxyglutarate (CAS #2889-31-8).

[0220] In another example, a Tet2 inhibitor according to the present invention has the following structure:

[chemical structure]

[0221] In another example, a Tet2 inhibitor according to the present invention is N-[3-[7-(2,5-Dimethyl-2H-pyrazol-3-ylamino)-1-methyl-2-oxo-1,4-dihydro-2H-pyrimido[4,5-d]pyrimidin-3-yl]-4-methylphenyl]-3-trifluoromethyl-benzamide (CAS #839707-37-8), and has the following structure:

[chemical structure]

[0222] In another example, a Tet2 inhibitor according to the present invention is 2-[(2,6-dichloro-3-methylphenyl)amino]benzoic acid (CAS #644-62-2), and has the following structure:

[chemical structure]

[0223] In embodiments, the Tet2 inhibitor of the present invention is a pharmaceutically acceptable salt of any of the foregoing.

[0224] HDAC Inhibitors

[0225] Any known HDAC inhibitors can be used according to the present invention. Non-limiting examples of HDAC inhibitors include Voninostat (Zolinza®); Romidepsin (Istodax®); Treichostatin A (TSA); Oxamflatin; Vorinostat (Zolinza®, Suberoylanilide hydroxamic acid); Pyroxamide (syberoyl-3-aminopyridineamide hydroxamic acid); Trapoxin A (RF-1023A); Trapoxin B (RF-10238); Cyclo[(αS,2S)-α-amino-η-oxo-2-oxiraneoctanoyl-O-methyl-D-tyrosyl-L-isoleucyl-L-prolyl] (Cyl-1); Cyclo[(αS,2S)-α-amino-η-oxo-2-oxiraneoctanoyl-O-methyl-D-tyrosyl-L-isoleucyl-(2S)-2-piperidinecarbonyl] (Cyl-2); Cyclic[L-alanyl-D-alanyl-(2S)-η-oxo-L-α-aminooxiraneoctanoyl-D-prolyl] (HC-toxin); Cyclo[(αS,2S)-α-amino-η-oxo-2-oxiraneoctanoyl-D-phenylalanyl-L-leucyl-(2S)-2-piperidinecarbonyl] (WF-3161); Chlamydocin ((S)-Cyclic(2-methylalanyl-L-phenylalanyl-D-prolyl-η-oxo-L-α-aminooxiraneoctanoyl); Apicidin (Cyclo(8-oxo-L-2-aminodecanoyl-1-methoxy-L-tryptophyl-L-isoleucyl-D-2-piperidinecarbonyl); Romidepsin (Istodax®, FR-901228); 4-Phenylbutyrate; Spiruchostatin A; Mylproin (Valproic acid); Entinostat (MS-275, N-(2-Aminophenyl)-4-[N-(pyridine-3-yl-methoxycarbonyl)-amino-methyl]-benzamide); Depudecin (4,5:8,9-dianhydro-1,2,6,7,11-pentadeoxy-D-threo-D-ido-Undeca-1,6-dienitol); 4-(Acetylamino)-N-(2-aminophenyl)-benzamide (also known as CI-994); N1-(2-Aminophenyl)-N8-phenyl-octanediamide (also known as BML-210); 4-(Dimethylamino)-N-(7-(hydroxyamino)-7-oxoheptyl)benzamide (also known as M344); (E)-3-(4-(((2-(1H-indol-3-yl)ethyl)(2-hydroxyethyl)amino)-methyl)phenyl)-N-hydroxyacrylamide (NVP-LAQ824); Panobinostat (Farydak®); Mocetinostat, and Belinostat.

### Proteins

[0226] Dominant Negative Tet2

[0227] According to the present invention, dominant negative Tet2 isoforms, and nucleic acid encoding said dominant negative Tet2, can be used as Tet2 inhibitors. In embodiments, the dominant negative Tet2 lacks catalytic function of Tet2. An example of a dominant negative Tet2 is a protein comprising or consisting of SEQ ID NO: 1357 with the mutation R1261G, according to the numbering of SEQ ID NO: 1357. An example of a dominant negative Tet2 is a protein comprising or consisting of SEQ ID NO: 1357 with the mutation R1262A, according to the numbering of SEQ ID NO: 1357. An example of a dominant negative Tet2 is a protein comprising or consisting of SEQ ID NO: 1357 with the mutation S1290A, according to the numbering of SEQ ID NO: 1357. An example of a dominant negative Tet2 is a protein comprising or consisting of SEQ ID NO: 1357 with the mutation WSMYYN (amino acids 1291-1296 of SEQ ID NO: 1357) to GGSGGS (SEQ ID NO: 67), according to the numbering of SEQ ID NO: 1357. An example of a dominant negative Tet2 is a protein comprising or consisting of SEQ ID NO: 1357 with the mutation M1293A and Y1294A, according to the numbering of SEQ ID NO: 1357. An example of a dominant negative Tet2 is a protein comprising or consisting of SEQ ID NO: 1357 with the mutation Y1295A, according to the numbering of SEQ ID NO: 1357. An example of a dominant negative Tet2 is a protein comprising or consisting of SEQ ID NO: 1357 with the mutation S1303N, according to the numbering of SEQ ID NO: 1357. An example of a dominant negative Tet2 is a protein comprising or consisting of SEQ ID NO: 1357 with the mutation H1382Y, according to the numbering of SEQ ID NO: 1357. An example of a dominant negative Tet2 is a protein comprising or consisting of SEQ ID NO: 1357 with the mutation D1384A, according to the numbering of SEQ ID NO: 1357. An example of a dominant negative Tet2 is a protein comprising or consisting of SEQ ID NO: 1357 with the mutation D1384V, according to the numbering of SEQ ID NO: 1357. In embodiments, the dominant negative Tet2 may include combinations of any of the aforementioned mutations. Such mutations are additionally described in, for example, Chen et al., Nature, 493:561-564 (2013); Hu et al, Cell, 155:1545-1555 (2013), the contents of which are hereby incorporated by reference in their entirety.

[0228] Dominant Negative Tet2 Binding Partners

[0229] Without being bound by theory, it is believed that Tet2 interacts, e.g., binds, with one or more HDAC, e.g., one or more HDAC expressed in immune effector cells, e.g., in T cells, and that such Tet2:HDAC complexes may contribute to Tet2 activity in the cell. In embodiments, a Tet2 inhibitor of the invention is a dominant negative Tet2 binding partner, e.g., a dominant negative Tet2-binding HDAC. In other embodiments, a Tet2 inhibitor of the invention comprises nucleic acid encoding a dominant negative Tet2 binding partner, e.g., a dominant negative Tet2-binding HDAC.

[0230] Vectors Encoding Tet2 Inhibitors

[0231] As described herein, the invention provides vectors, e.g., as described herein, which encode Tet, e.g., Tet1, Tet2 and/or Tet3, e.g., Tet2, inhibitors, such as the gene editing systems, shRNA or siRNA inhibitors or dominant negative inhibitors of Tet, e.g., Tet1, Tet2 and/or Tet3, e.g., Tet2 (e.g., as described herein).

[0232] In embodiments further comprising, for example, a CAR, the nucleic acid may further comprise sequence encoding a CAR, e.g., as described herein. In some embodiments, the invention provides a vector comprising a nucleic acid sequence encoding a Tet, e.g., Tet1, Tet2 and/or Tet3, e.g., Tet2 inhibitor described herein and comprising a nucleic acid sequence encoding a CAR molecule described herein. In embodiments, nucleic acid sequences are disposed on separate vectors. In other embodiments, the two or more nucleic acid sequences are encoded by a single nucleic molecule in the same frame and as a single polypeptide chain. In this aspect, the two or more CARs can, e.g., be separated by one or more peptide cleavage sites. (e.g., an auto-cleavage site or a substrate for an intracellular protease). Examples of peptide cleavage sites include the following, wherein the GSG residues are optional:

T2A:
(SEQ ID NO: 68)
(GSG) E G R G S L L T C G D V E E N P G P
P2A:
(SEQ ID NO: 69)
(GSG) A T N F S L L K Q A G D V E E N P G P
E2A:
(SEQ ID NO: 70)
(GSG) Q C T N Y A L L K L A G D V E S N P G P
F2A:
(SEQ ID NO: 71)
(GSG) V K Q T L N F D L L K L A G D V E S N P G P.

[0233] These peptide cleavage sites are referred to collectively herein as “2A sites.” In embodiments, the vector comprises nucleic acid sequence encoding a CAR described herein and nucleic acid sequence encoding a shRNA or siRNA Tet, e.g., Tet1, Tet2 and/or Tet3, e.g., Tet2, Inhibitor described herein. In embodiments, the vector comprises nucleic acid sequence encoding a CAR described herein and nucleic acid sequence encoding a genome editing system (e.g., a CRISPR/Cas system) Tet e.g., Tet1, Tet2 and/or Tet3, e.g., Tet2, Inhibitor described herein.

Methods of Use of Tet, e.g., Tet1, Tet2 and/or Tet3, e.g., Tet2, Inhibitors

[0234] The invention provides methods of increasing the therapeutic efficacy of a CAR-expressing cell, e.g., a cell expressing a CAR as described herein, e.g., a CAR19-expressing cell (e.g., CTL019), comprising a step of decreasing the level of 5-hydroxymethylcytosine in said cell. In embodiments, the method comprises reducing or eliminating the function or expression of Tet, e.g., Tet1, Tet2 and/or Tet3, e.g., Tet2. In embodiments, the method comprises contacting said cells with a Tet, e.g., Tet1, Tet2 and/or Tet3, e.g., Tet2, inhibitor as described herein.

[0235] The invention further provides methods of manufacturing a CAR-expressing cell, e.g., a CAR-expressing cell having improved function (e.g., having improved efficacy, e.g., tumor targeting, or proliferation) comprising the step of reducing or eliminating the expression or function of Tet, e.g., Tet1, Tet2 and/or Tet3, e.g., Tet2, in said cell. In embodiments, the method comprises contacting said cells with a Tet, e.g., Tet1, Tet2 and/or Tet3, e.g., Tet2, inhibitor as described herein. In embodiments, the contacting is done ex vivo. In embodiments, the contacting is done in vivo. In embodiments, the contacting is done prior to, simultaneously with, or after said cells are modified to express a CAR, e.g., a CAR as described herein.

[0236] In embodiments, the invention provides a method for inhibiting a function or expression of Tet, e.g., Tet1, Tet2 and/or Tet3, e.g., Tet2, in a CAR-expressing cell, e.g., a cell expressing a CAR as described herein, e.g., a CAR19-expressing cell (e.g., CTL019-expressing cell), the method comprising a step of decreasing the level of 5-hydroxymethylcytosine in said cell. In embodiments, the method comprises reducing or eliminating the function or expression of Tet, e.g., Tet1, Tet2 and/or Tet3, e.g., Tet2. In embodiments, the method comprises contacting said cells with a Tet, e.g., Tet1, Tet2 and/or Tet3, e.g., Tet2, inhibitor as described herein.

[0237] In one embodiment, the invention provides a method, e.g., a method described above, comprises introducing nucleic acid encoding a CAR into a cell, e.g., an immune effector cell, e.g., a T cell, at a site within the Tet gene, or its regulatory elements, such that expression of Tet, e.g., Tet1, Tet2 and/or Tet3, e.g., Tet2, is disrupted. Integration at a site within the Tet, e.g., Tet1, Tet2 and/or Tet3, e.g., Tet2, gene may be accomplished, for example, using a Tet, e.g., Tet1, Tet2 and/or Tet3, e.g., Tet2-targeting gene editing system as described above.

[0238] In one embodiment, the invention provides a method, e.g., a method described above, comprising a step of introducing into the cell a gene editing system, e.g., a CRISPR/Cas gene editing system which targets Tet, e.g., Tet1, Tet2 and/or Tet3, e.g., Tet2, e.g., a CRISPR/Cas system comprising a gRNA which has a targeting sequence complementary to a target sequence of the Tet, e.g., Tet1, Tet2 and/or Tet3, e.g., Tet2, gene. In embodiments, the CRISPR/Cas system is introduced into said cell as a ribonuclear protein complex of gRNA and Cas enzyme, e.g., is introduced via electroporation. In one embodiment, the method comprises introducing nucleic acid encoding one or more of the components of the CRISPR/Cas system into said cell. In one embodiment, said nucleic acid is disposed on the vector encoding a CAR, e.g., a CAR as described herein.

[0239] In one embodiment, the invention provides a method, e.g., a method described above, comprising a step of introducing into the cell an inhibitory dsRNA, e.g., a shRNA or siRNA, which targets Tet, e.g., Tet1, Tet2 and/or Tet3, e.g., Tet2. In one embodiment, the method comprises introducing into said cell nucleic acid encoding an inhibitory dsRNA, e.g., a shRNA or siRNA, which targets Tet, e.g., Tet1, Tet2 and/or Tet3, e.g., Tet2. In one embodiment, said nucleic acid is disposed on the vector encoding a CAR, e.g., a CAR as described herein.

[0240] Additional components of CARs and CAR T cells, and methods pertaining to the invention are described below.

[0241] Provided herein are compositions of matter and methods of use for the treatment of a disease such as cancer using immune effector cells (e.g., T cells, NK cells) engineered with CARs of the invention.

[0242] In one aspect, the invention provides a number of chimeric antigen receptors (CAR) comprising an antigen binding domain (e.g., antibody or antibody fragment, TCR or TCR fragment) engineered for specific binding to a tumor antigen, e.g., a tumor antigen described herein. In one aspect, the invention provides an immune effector cell (e.g., T cell, NK cell) engineered to express a CAR, wherein the engineered immune effector cell exhibits an anticancer property. In one aspect, a cell is transformed with the CAR and the CAR is expressed on the cell surface. In some embodiments, the cell (e.g., T cell, NK cell) is transduced with a viral vector encoding a CAR. In some embodiments, the viral vector is a retroviral vector. In some embodiments, the viral vector is a lentiviral vector. In some such embodiments, the cell may stably express the CAR. In another embodiment, the cell (e.g., T cell, NK cell) is transfected with a nucleic acid, e.g., mRNA, cDNA, DNA, encoding a CAR. In some such embodiments, the cell may transiently express the CAR.

[0243] In one aspect, the antigen binding domain of a CAR described herein is a scFv antibody fragment. In one aspect, such antibody fragments are functional in that they retain the equivalent binding affinity, e.g., they bind the same antigen with comparable affinity, as the IgG antibody from which it is derived. In other embodiments, the antibody fragment has a lower binding affinity, e.g., it binds the same antigen with a lower binding affinity than the antibody from which it is derived, but is functional in that it provides a biological response described herein. In one embodiment, the CAR molecule comprises an antibody fragment that has a binding affinity KD of 10⁻⁴ M to 10⁻⁸ M, e.g., 10⁻⁵ M to 10⁻⁷ M, e.g., 10⁻⁶ M or 10⁻⁷ M, for the target antigen. In one embodiment, the antibody fragment has a binding affinity that is at least five-fold, 10-fold, 20-fold, 30-fold, 50-fold, 100-fold or 1,000-fold less than a reference antibody, e.g., an antibody described herein.

[0244] In one aspect such antibody fragments are functional in that they provide a biological response that can include, but is not limited to, activation of an immune response, inhibition of signal-transduction origination from its target antigen, inhibition of kinase activity, and the like, as will be understood by a skilled artisan.

[0245] In one aspect, the antigen binding domain of the CAR is a scFv antibody fragment that is humanized compared to the murine sequence of the scFv from which it is derived.

[0246] In one aspect, the antigen binding domain of a CAR of the invention (e.g., a scFv) is encoded by a nucleic acid molecule whose sequence has been codon optimized for expression in a mammalian cell. In one aspect, entire CAR construct of the invention is encoded by a nucleic acid molecule whose entire sequence has been codon optimized for expression in a mammalian cell. Codon optimization refers to the discovery that the frequency of occurrence of synonymous codons (i.e., codons that code for the same amino acid) in coding DNA is biased in different species. Such codon degeneracy allows an identical polypeptide to be encoded by a variety of nucleotide sequences. A variety of codon optimization methods is known in the art, and include, e.g., methods disclosed in at least U.S. Pat. Nos. 5,786,464 and 6,114,148.

[0247] In one aspect, the CARs of the invention combine an antigen binding domain of a specific antibody with an intracellular signaling molecule. For example, in some aspects, the intracellular signaling molecule includes, but is not limited to, CD3-zeta chain, 4-1BB and CD28 signaling modules and combinations thereof. In one aspect, the antigen binding domain binds to a tumor antigen as described herein.

[0248] Furthermore, the present invention provides CARs and CAR-expressing cells and their use in medicaments or methods for treating, among other diseases, cancer or any malignancy or autoimmune diseases involving cells or tissues which express a tumor antigen as described herein.

[0249] In one aspect, the CAR of the invention can be used to eradicate a normal cell that express a tumor antigen as described herein, thereby applicable for use as a cellular conditioning therapy prior to cell transplantation. In one aspect, the normal cell that expresses a tumor antigen as described herein is a normal stem cell and the cell transplantation is a stem cell transplantation.

[0250] In one aspect, the invention provides an immune effector cell (e.g., T cell, NK cell) engineered to express a chimeric antigen receptor (CAR), wherein the engineered immune effector cell exhibits an antitumor property. A preferred antigen is a cancer associated antigen (i.e., tumor antigen) described herein. In one aspect, the antigen binding domain of the CAR comprises a partially humanized antibody fragment. In one aspect, the antigen binding domain of the CAR comprises a partially humanized scFv. Accordingly, the invention provides CARs that comprises a humanized antigen binding domain and is engineered into a cell, e.g., a T cell or a NIK cell, and methods of their use for adoptive therapy.

[0251] In one aspect, the CARs of the invention comprise at least one intracellular domain selected from the group of a CD137 (4-1BB) signaling domain, a CD28 signaling domain, a CD27 signal domain, a CD3zeta signal domain, and any combination thereof. In one aspect, the CARs of the invention comprise at least one intracellular signaling domain is from one or more costimulatory molecule(s) other than a CD137 (4-1BB) or CD28.

[0252] Sequences of some examples of various components of CARs of the instant invention is listed in Table 1, where aa stands for amino acids, and na stands for nucleic acids that encode the corresponding peptide.

TABLE 1
Sequences of various components of CAR (aa—amino acids,
na—nucleic acids that encodes the corresponding protein)

| SEQ | | | Corresp. |
|---|---|---|---|
| ID | | | To |
| NO | description | Sequence | huCD19 |
| 1 | EF-1 | CGTGAGGCTCCGGTGCCCGTCAGTGGGCAGAGCGCACATCGCCCAC | 100 |
| | promoter | AGTCCCCGAGAAGTTGGGGGGAGGGGTCGGCAATTGAACCGGTGC | |
| | | CTAGAGAAGGTGGCGCGGGGTAAACTGGGAAAGTGATGTCGTGTA | |
| | | CTGGCTCCGCCTTTTTCCCGAGGGTGGGGGAGAACCGTATATAAGT | |
| | | GCAGTAGTCGCCGTGAACGTTCTTTTTCGCAACGGGTTTGCCGCCAG | |
| | | AACACAGGTAAGTGCCGTGTGTGGTTCCCGCGGGCCTGGCCTCTTTA | |
| | | CGGGTTATGGCCCTTGCGTGCCTTGAATTACTTCCACCTGGCTGCAG | |
| | | TACGTGATTCTTGATCCCGAGCTTCGGGTTGGAAGTGGGTGGGAGA | |
| | | GTTCGAGGCCTTGCGCTTAAGGAGCCCCTTCGCCTCGTGCTTGAGTT | |
| | | GAGGCCTGGCCTGGGCGCTGGGGCCGCCGCGTGCGAATCTGGTGG | |
| | | CACCTTCGCGCCTGTCTCGCTGCTTTCGATAAGTCTCTAGCCATTTAA | |
| | | AATTTTTGATGACCTGCTGCGACGCTTTTTTTCTGGCAAGATAGTCTT | |
| | | GTAAATGCGGGCCAAGATCTGCACACTGGTATTTCGGTTTTTGGGGC | |
| | | CGCGGGCGGCGACGGGGCCCGTGCGTCCCAGCGCACATGTTCGGC | |
| | | GAGGCGGGGCCTGCGAGCGCGGCCACCGAGAATCGGACGGGGGTA | |
| | | GTCTCAAGCTGGCCGGCCTGCTCTGGTGCCTGGCCTCGCGCCGCCGT | |
| | | GTATCGCCCCGCCCTGGGCGGCAAGGCTGGCCCGGTCGGCACCAGT | |
| | | TGCGTGAGCGGAAAGATGGCCGCTTCCCGGCCCTGCTGCAGGGAGC | |
| | | TCAAAATGGAGGACGCGGCGCTCGGGAGAGCGGGCGGGTGAGTCA | |
| | | CCCACACAAAGGAAAAGGGCCTTTCCGTCCTCAGCCGTCGCTTCATG | |
| | | TGACTCCACGGAGTACCGGGCGCCGTCCAGGCACCTCGATTAGTTCT | |
| | | CGAGCTTTTGGAGTACGTCGTCTTTAGGTTGGGGGGAGGGGTTTTAT | |
| | | GCGATGGAGTTTCCCCACACTGAGTGGGTGGAGACTGAAGTTAGGC | |
| | | CAGCTTGGCACTTGATGTAATTCTCCTTGGAATTTGCCCTTTTTGAGT | |
| | | TTGGATCTTGGTTCATTCTCAAGCCTCAGACAGTGGTTCAAAGTTTTT | |
| | | TTCTTCCATTTCAGGTGTCGTGA | |
| 2 | Leader (aa) | MALPVTALLLPLALLLHAARP | 13 |
| 3 | Leader (na) | ATGGCCCTGCCTGTGACAGCCCTGCTGCTGCCTCTGGCTCTGCTGCT | 54 |
| | | GCATGCCGCTAGACCC | |
| 4 | CD 8 hinge | TTTPAPRPPTPAPTIASQPLSLRPEACRPAAGGAVHTRGLDFACD | 14 |
| | (aa) | | |
| 5 | CD8 hinge | ACCACGACGCCAGCGCCGCGACCACCAACACCGGCGCCCACCATCG | 55 |
| | (na) | CGTCGCAGCCCCTGTCCCTGCGCCCAGAGGCGTGCCGGCCAGCGGC | |
| | | GGGGGGCGCAGTGCACACGAGGGGGCTGGACTTCGCCTGTGAT | |
| 6 | Ig4 hinge | ESKYGPPCPPCPAPEFLGGPSVFLFPPKPKDTLMISRTPEVTCVVVDVSQ | 102 |
| | (aa) | EDPEVQFNWYVDGVEVHNAKTKPREEQFNSTYRVVSVLTVLHQDWLN | |
| | | GKEYKCKVSNKGLPSSIEKTISKAKGQPREPQVYTLPPSQEEMTKNQVSL | |
| | | TCLVKGFYPSDIAVEWESNGQPENNYKTTPPVLDSDGSFFLYSRLTVDKS | |
| | | RWQEGNVFSCSVMHEALHNHYTQKSLSLSLGKM | |
| 7 | Ig4 hinge | GAGAGCAAGTACGGCCCTCCCTGCCCCCCTTGCCCTGCCCCCGAGTT | 103 |
| | (na) | CCTGGGCGGACCCAGCGTGTTCCTGTTCCCCCCCAAGCCCAAGGACA | |
| | | CCCTGATGATCAGCCGGACCCCCGAGGTGACCTGTGTGGTGGTGGA | |
| | | CGTGTCCCAGGAGGACCCCGAGGTCCAGTTCAACTGGTACGTGGAC | |
| | | GGCGTGGAGGTGCACAACGCCAAGACCAAGCCCCGGGAGGAGCAG | |
| | | TTCAATAGCACCTACCGGGTGGTGTCCGTGCTGACCGTGCTGCACCA | |
| | | GGACTGGCTGAACGGCAAGGAATACAAGTGTAAGGTGTCCAACAAG | |
| | | GGCCTGCCCAGCAGCATCGAGAAAACCATCAGCAAGGCCAAGGGCC | |
| | | AGCCTCGGGAGCCCCAGGTGTACACCCTGCCCCCTAGCCAAGAGGA | |
| | | GATGACCAAGAACCAGGTGTCCCTGACCTGCCTGGTGAAGGGCTTCT | |
| | | ACCCCAGCGACATCGCCGTGGAGTGGGAGAGCAACGGCCAGCCCG | |
| | | AGAACAACTACAAGACCACCCCCCCTGTGCTGGACAGCGACGGCAG | |
| | | CTTCTTCCTGTACAGCCGGCTGACCGTGGACAAGAGCCGGTGGCAG | |
| | | GAGGGCAACGTCTTTAGCTGCTCCGTGATGCACGAGGCCCTGCACA | |
| | | ACCACTACACCCAGAAGAGCCTGAGCCTGTCCCTGGGCAAGATG | |
| 8 | IgD hinge | RWPESPKAQASSVPTAQPQAEGSLAKATTAPATTRNTGRGGEEKKKEK | 47 |
| | (aa) | EKEEQEERETKTPECPSHTQPLGVYLLTPAVQDLWLRDKATFTCFVVGS | |
| | | DLKDAHLTWEVAGKVPTGGVEEGLLERHSNGSQSQHSRLTLPRSLWN | |
| | | AGTSVTCTLNHPSLPPQRLMALREPAAQAPVKLSLNLLASSDPPEAASW | |
| | | LLCEVSGFSPPNILLMWLEDQREVNTSGFAPARPPPQPGSTTFWAWSV | |
| | | LRVPAPPSPQPATYTCVVSHEDSRTLLNASRSLEVSYVTDH | |
| 9 | IgD hinge | AGGTGGCCCGAAAGTCCCAAGGCCCAGGCATCTAGTGTTCCTACTGC | 48 |
| | (na) | ACAGCCCCAGGCAGAAGGCAGCCTAGCCAAAGCTACTACTGCACCT | |
| | | GCCACTACGCGCAATACTGGCCGTGGCGGGGAGGAGAAGAAAAAG | |
| | | GAGAAAGAGAAAGAAGAACAGGAAGAGAGGGAGACCAAGACCCCT | |
| | | GAATGTCCATCCCATACCCAGCCGCTGGGCGTCTATCTCTTGACTCCC | |
| | | GCAGTACAGGACTTGTGGCTTAGAGATAAGGCCACCTTTACATGTTT | |
| | | CGTCGTGGGCTCTGACCTGAAGGATGCCCATTTGACTTGGGAGGTT | |
| | | GCCGGAAAGGTACCCACAGGGGGGGTTGAGGAAGGGTTGCTGGAG | |
| | | CGCCATTCCAATGGCTCTCAGAGCCAGCACTCAAGACTCACCCTTCC | |
| | | GAGATCCCTGTGGAACGCCGGGACCTCTGTCACATGTACTCTAAATC | |
| | | ATCCTAGCCTGCCCCCACAGCGTCTGATGGCCCTTAGAGAGCCAGCC | |
| | | GCCCAGGCACCAGTTAAGCTTAGCCTGAATCTGCTCGCCAGTAGTGA | |
| | | TCCCCCAGAGGCCGCCAGCTGGCTCTTATGCGAAGTGTCCGGCTTTA | |
| | | GCCCGCCCAACATCTTGCTCATGTGGCTGGAGGACCAGCGAGAAGT | |
| | | GAACACCAGCGGCTTCGCTCCAGCCCGGCCCCCACCCCAGCCGGGTT | |
| | | CTACCACATTCTGGGCCTGGAGTGTCTTAAGGGTCCCAGCACCACCT | |
| | | AGCCCCCAGCCAGCCACATACACCTGTGTTGTGTCCCATGAAGATAG | |
| | | CAGGACCCTGCTAAATGCTTCTAGGAGTCTGGAGGTTTCCTACGTGA | |
| | | CTGACCATT | |
| 10 | GS | GGGGSGGGGS | 49 |
| | hinge/linker | | |
| | (aa) | | |
| 11 | GS | GGTGGCGGAGGTTCTGGAGGTGGAGGTTCC | 50 |
| | hinge/linker | | |
| | (na) | | |
| 12 | CD8TM (aa) | IYIWAPLAGTCGVLLLSLVITLYC | 15 |
| 13 | CD8 TM (na) | ATCTACATCTGGGCGCCCTTGGCCGGGACTTGTGGGGTCCTTCTCCT | 56 |
| | | GTCACTGGTTATCACCCTTTACTGC | |
| 14 | 4-1BB | KRGRKKLLYIFKQPFMRPVQTTQEEDGCSCRFPEEEEGGCEL | 16 |
| | intracellular | | |
| | domain (aa) | | |
| 15 | 4-1BB | AAACGGGGCAGAAAGAAACTCCTGTATATATTCAAACAACCATTTAT | 60 |
| | intracellular | GAGACCAGTACAAACTACTCAAGAGGAAGATGGCTGTAGCTGCCGA | |
| | domain (na) | TTTCCAGAAGAAGAAGAAGGAGGATGTGAACTG | |
| 16 | CD27 (aa) | QRRKYRSNKGESPVEPAEPCRYSCPREEEGSTIPIQEDYRKPEPACSP | 51 |
| 17 | CD27 (na) | AGGAGTAAGAGGAGCAGGCTCCTGCACAGTGACTACATGAACATGA | 52 |
| | | CTCCCCGCCGCCCCGGGCCCACCCGCAAGCATTACCAGCCCTATGCC | |
| | | CCACCACGCGACTTCGCAGCCTATCGCTCC | |
| 18 | CD3-zeta | RVKFSRSADAPAYKQGQNQLYNELNLGRREEYDVLDKRRGRDPEMGG | 17 |
| | (aa) | KPRRKNPQEGLYNELQKDKMAEAYSEIGMKGERRRGKGHDGLYQGLS | |
| | | TATKDTYDALHMQALPPR | |
| 19 | CD3-zeta | AGAGTGAAGTTCAGCAGGAGCGCAGACGCCCCCGCGTACAAGCAG | 101 |
| | (na) | GGCCAGAACCAGCTCTATAACGAGCTCAATCTAGGACGAAGAGAGG | |
| | | AGTACGATGTTTTGGACAAGAGACGTGGCCGGGACCCTGAGATGGG | |
| | | GGGAAAGCCGAGAAGGAAGAACCCTCAGGAAGGCCTGTACAATGA | |
| | | ACTGCAGAAAGATAAGATGGCGGAGGCCTACAGTGAGATTGGGAT | |
| | | GAAAGGCGAGCGCCGGAGGGGCAAGGGGCACGATGGCCTTTACCA | |
| | | GGGTCTCAGTACAGCCACCAAGGACACCTACGACGCCCTTCACATGC | |
| | | AGGCCCTGCCCCCTCGC | |
| 20 | CD3-zeta | RVKFSRSADAPAYQQGQNQLYNELNLGRREEYDVLDKRRGRDPEMGG | 43 |
| | (aa) | KPRRKNPQEGLYNELQKDKMAEAYSEIGMKGERRRGKGHDGLYQGLS | |
| | | TATKDTYDALHMQALPPR | |
| 21 | CD3-zeta | AGAGTGAAGTTCAGCAGGAGCGCAGACGCCCCCGCGTACCAGCAG | 44 |
| | (na) | GGCCAG | |
| | | AACCAGCTCTATAACGAGCTCAATCTAGGACGAAGAGAGGAGTACG | |
| | | ATGTTT | |
| | | TGGACAAGAGACGTGGCCGGGACCCTGAGATGGGGGGAAAGCCGA | |
| | | GAAGGA | |
| | | AGAACCCTCAGGAAGGCCTGTACAATGAACTGCAGAAAGATAAGAT | |
| | | GGCGG | |
| | | AGGCCTACAGTGAGATTGGGATGAAAGGCGAGCGCCGGAGGGGCA | |
| | | AGGGGC | |
| | | ACGATGGCCTTTACCAGGGTCTCAGTACAGCCACCAAGGACACCTAC | |
| | | GACGC | |
| | | CCTTCACATGCAGGCCCTGCCCCCTCGC | |
| 22 | linker | GGGGS | 18 |
| 23 | linker | GGTGGCGGAGGTTCTGGAGGTGGAGGTTCC | 50 |
| 24 | PD-1 | Pgwfldspdrpwnpptfspallvvtegdnatftcsfsntsesfvlnwyrmspsnqtdkl | |
| | extracellular | aafpedrsqpgqdcrfrvtqlpngrdfhmsvvrarrndsgtylcgaislapkaqikeslra | |
| | domain (aa) | elrvterraevptahpspsprpagqfqtlv | |
| 25 | PD-1 | Cccggatggtttctggactctccggatcgcccgtggaatcccccaaccttctcaccggcact | |
| | extracellular | cttggttgtgactgagggcgataatgcgaccttcacgtgctcgttctccaacacctccgaat | |
| | domain (na) | cattcgtgctgaactggtaccgcatgagcccgtcaaaccagaccgacaagctcgccgcgtt | |
| | | tccggaagatcggtcgcaaccgggacaggattgtcggttccgcgtgactcaactgccgaat | |
| | | ggcagagacttccacatgagcgtggtccgcgctaggcgaaacgactccgggacctacctg | |
| | | tgcggagccatctcgctggcgcctaaggcccaaatcaaagagagcttgagggccgaactg | |
| | | agagtgaccgagcgcagagctgaggtgccaactgcacatccatccccatcgcctcggcct | |
| | | gcggggcagtttcagaccctggtc | |
| 26 | PD-1 CAR | Malpvtalllplalllhaarppgwfldspdrpwnpptfspallvvtegdnatftcsfsntse | |
| | (aa) with | sfvlnwyrmspsnqtdklaafpedrsqpgqdcrfrvtqlpngrdfhmsvvrarrndsgt | |
| | signal | ylcgaislapkaqikeslraelrvterraevptahpspsprpagqfqtlvtttpaprpptpa | |
| | | ptiasqplslrpeacrpaaggavhtrgldfacdiyiwaplagtcgvlllslvitlyckrgrkklly | |
| | | ifkqpfmrpvqttqeedgcscrfpeeeeggcelrvkfsrsadapaykqgqnqlynelnl | |
| | | grreeydvldkrrgrdpemggkprrknpqeglynelqkdkmaeayseigmkgerrrg | |
| | | kghdglyqglstatkdtydalhmqalppr | |
| 27 | PD-1 CAR | Atggccctccctgtcactgccctgcttctccccctcgcactcctgctccacgccgctagacca | |
| | (na) | cccggatggtttctggactctccggatcgcccgtggaatcccccaaccttctcaccggcact | |
| | | cttggttgtgactgagggcgataatgcgaccttcacgtgctcgttctccaacacctccgaat | |
| | | cattcgtgctgaactggtaccgcatgagcccgtcaaaccagaccgacaagctcgccgcgtt | |
| | | tccggaagatcggtcgcaaccgggacaggattgtcggttccgcgtgactcaactgccgaat | |
| | | ggcagagacttccacatgagcgtggtccgcgctaggcgaaacgactccgggacctacctg | |
| | | tgcggagccatctcgctggcgcctaaggcccaaatcaaagagagcttgagggccgaactg | |
| | | agagtgaccgagcgcagagctgaggtgccaactgcacatccatccccatcgcctcggcct | |
| | | gcggggcagtttcagaccctggtcacgaccactccggcgccgcgcccaccgactccggcc | |
| | | ccaactatcgcgagccagcccctgtcgctgaggccggaagcatgccgccctgccgccgga | |
| | | ggtgctgtgcatacccggggattggacttcgcatgcgacatctacatttgggctcctctcgc | |
| | | cggaacttgtggcgtgctccttctgtccctggtcatcaccctgtactgcaagcggggtcgga | |
| | | aaaagcttctgtacattttcaagcagcccttcatgaggcccgtgcaaaccacccaggagga | |
| | | ggacggttgctcctgccggttccccgaagaggaagaaggaggttgcgagctgcgcgtgaa | |
| | | gttctcccggagcgccgacgcccccgcctataagcagggccagaaccagctgtacaacga | |
| | | actgaacctgggacggcgggaagagtacgatgtgctggacaagcggcgcggccgggacc | |
| | | ccgaaatgggcgggaagcctagaagaaagaaccctcaggaaggcctgtataacgagctg | |
| | | cagaaggacaagatggccgaggcctactccgaaattgggatgaagggagagcggcgga | |
| | | ggggaaaggggcacgacggcctgtaccaaggactgtccaccgccaccaaggacacatac | |
| | | gatgccctgcacatgcaggcccttccccctcgc | |
| 28 | linker | (Gly-Gly-Gly-Ser)n, where n = 1-10 | 105 |
| 29 | linker | (Gly4 Ser)4 | 106 |
| 30 | linker | (Gly4 Ser)3 | 107 |
| 31 | linker | (Gly3Ser) | 108 |
| 32 | polyA | aaaaaaaaaa aaaaaaaaaa aaaaaaaaaa aaaaaaaaaa aaaaaaaaaa | 118 |
| | | aaaaaaaaaa aaaaaaaaaa aaaaaaaaaa aaaaaaaaaa aaaaaaaaaa | |
| | | aaaaaaaaaa aaaaaaaaaa aaaaaaaaaa aaaaaaaaaa aaaaaaaaaa | |
| | | aaaaaaaaaa aaaaaaaaaa aaaaaaaaaa aaaaaaaaaa aaaaaaaaaa | |
| | | aaaaaaaaaa aaaaaaaaaa aaaaaaaaaa aaaaaaaaaa aaaaaaaaaa | |
| | | aaaaaaaaaa aaaaaaaaaa aaaaaaaaaa aaaaaaaaaa aaaaaaaaaa | |
| | | aaaaaaaaaa aaaaaaaaaa aaaaaaaaaa aaaaaaaaaa aaaaaaaaaa | |
| | | aaaaaaaaaa aaaaaaaaaa aaaaaaaaaa aaaaaaaaaa aaaaaaaaaa | |
| | | aaaaaaaaaa aaaaaaaaaa aaaaaaaaaa aaaaaaaaaa aaaaaaaaaa | |
| | | aaaaaaaaaa aaaaaaaaaa aaaaaaaaaa aaaaaaaaaa aaaaaaaaaa | |
| | | aaaaaaaaaa aaaaaaaaaa aaaaaaaaaa aaaaaaaaaa aaaaaaaaaa | |
| | | aaaaaaaaaa aaaaaaaaaa aaaaaaaaaa aaaaaaaaaa aaaaaaaaaa | |
| | | aaaaaaaaaa aaaaaaaaaa aaaaaaaaaa aaaaaaaaaa aaaaaaaaaa | |
| | | aaaaaaaaaa aaaaaaaaaa aaaaaaaaaa aaaaaaaaaa aaaaaaaaaa | |
| | | aaaaaaaaaa aaaaaaaaaa aaaaaaaaaa aaaaaaaaaa aaaaaaaaaa | |
| | | aaaaaaaaaa aaaaaaaaaa aaaaaaaaaa aaaaaaaaaa aaaaaaaaaa | |
| | | aaaaaaaaaa aaaaaaaaaa aaaaaaaaaa aaaaaaaaaa aaaaaaaaaa | |
| | | aaaaaaaaaa aaaaaaaaaa aaaaaaaaaa aaaaaaaaaa aaaaaaaaaa | |
| | | aaaaaaaaaa aaaaaaaaaa aaaaaaaaaa aaaaaaaaaa aaaaaaaaaa | |
| | | aaaaaaaaaa aaaaaaaaaa aaaaaaaaaa aaaaaaaaaa aaaaaaaaaa | |
| | | aaaaaaaaaa aaaaaaaaaa aaaaaaaaaa aaaaaaaaaa aaaaaaaaaa | |
| | | aaaaaaaaaa aaaaaaaaaa aaaaaaaaaa aaaaaaaaaa aaaaaaaaaa | |
| | | aaaaaaaaaa aaaaaaaaaa aaaaaaaaaa aaaaaaaaaa aaaaaaaaaa | |
| | | aaaaaaaaaa aaaaaaaaaa aaaaaaaaaa aaaaaaaaaa aaaaaaaaaa | |
| | | aaaaaaaaaa aaaaaaaaaa aaaaaaaaaa aaaaaaaaaa aaaaaaaaaa | |
| | | aaaaaaaaaa aaaaaaaaaa aaaaaaaaaa aaaaaaaaaa aaaaaaaaaa | |
| | | aaaaaaaaaa aaaaaaaaaa aaaaaaaaaa aaaaaaaaaa aaaaaaaaaa | |
| | | aaaaaaaaaa aaaaaaaaaa aaaaaaaaaa aaaaaaaaaa aaaaaaaaaa | |
| | | aaaaaaaaaa aaaaaaaaaa aaaaaaaaaa aaaaaaaaaa aaaaaaaaaa | |
| | | aaaaaaaaaa aaaaaaaaaa aaaaaaaaaa aaaaaaaaaa aaaaaaaaaa | |
| | | aaaaaaaaaa aaaaaaaaaa aaaaaaaaaa aaaaaaaaaa aaaaaaaaaa | |
| | | aaaaaaaaaa aaaaaaaaaa aaaaaaaaaa aaaaaaaaaa aaaaaaaaaa | |
| | | aaaaaaaaaa aaaaaaaaaa aaaaaaaaaa aaaaaaaaaa aaaaaaaaaa | |
| | | aaaaaaaaaa aaaaaaaaaa aaaaaaaaaa aaaaaaaaaa aaaaaaaaaa | |
| | | aaaaaaaaaa aaaaaaaaaa aaaaaaaaaa aaaaaaaaaa aaaaaaaaaa | |
| | | aaaaaaaaaa aaaaaaaaaa aaaaaaaaaa aaaaaaaaaa aaaaaaaaaa | |
| | | aaaaaaaaaa aaaaaaaaaa aaaaaaaaaa aaaaaaaaaa aaaaaaaaaa | |
| | | aaaaaaaaaa aaaaaaaaaa aaaaaaaaaa aaaaaaaaaa aaaaaaaaaa | |
| | | aaaaaaaaaa aaaaaaaaaa aaaaaaaaaa aaaaaaaaaa aaaaaaaaaa | |
| | | aaaaaaaaaa aaaaaaaaaa aaaaaaaaaa aaaaaaaaaa aaaaaaaaaa | |
| 33 | polyA | aaaaaaaaaa aaaaaaaaaa aaaaaaaaaa aaaaaaaaaa aaaaaaaaaa | 104 |
| | | aaaaaaaaaa aaaaaaaaaa aaaaaaaaaa aaaaaaaaaa aaaaaaaaaa | |
| | | aaaaaaaaaa aaaaaaaaaa aaaaaaaaaa aaaaaaaaaa aaaaaaaaaa | |
| 34 | polyA | aaaaaaaaaa aaaaaaaaaa aaaaaaaaaa aaaaaaaaaa aaaaaaaaaa | 109 |
| | | aaaaaaaaaa aaaaaaaaaa aaaaaaaaaa aaaaaaaaaa aaaaaaaaaa | |
| | | aaaaaaaaaa aaaaaaaaaa aaaaaaaaaa aaaaaaaaaa aaaaaaaaaa | |
| | | aaaaaaaaaa aaaaaaaaaa aaaaaaaaaa aaaaaaaaaa aaaaaaaaaa | |
| | | aaaaaaaaaa aaaaaaaaaa aaaaaaaaaa aaaaaaaaaa aaaaaaaaaa | |
| | | aaaaaaaaaa aaaaaaaaaa aaaaaaaaaa aaaaaaaaaa aaaaaaaaaa | |
| | | aaaaaaaaaa aaaaaaaaaa aaaaaaaaaa aaaaaaaaaa aaaaaaaaaa | |
| | | aaaaaaaaaa aaaaaaaaaa aaaaaaaaaa aaaaaaaaaa aaaaaaaaaa | |
| | | aaaaaaaaaa aaaaaaaaaa aaaaaaaaaa aaaaaaaaaa aaaaaaaaaa | |
| | | aaaaaaaaaa aaaaaaaaaa aaaaaaaaaa aaaaaaaaaa aaaaaaaaaa | |
| | | aaaaaaaaaa aaaaaaaaaa aaaaaaaaaa aaaaaaaaaa aaaaaaaaaa | |
| | | aaaaaaaaaa aaaaaaaaaa aaaaaaaaaa aaaaaaaaaa aaaaaaaaaa | |
| | | aaaaaaaaaa aaaaaaaaaa aaaaaaaaaa aaaaaaaaaa aaaaaaaaaa | |
| | | aaaaaaaaaa aaaaaaaaaa aaaaaaaaaa aaaaaaaaaa aaaaaaaaaa | |
| | | aaaaaaaaaa aaaaaaaaaa aaaaaaaaaa aaaaaaaaaa aaaaaaaaaa | |
| | | aaaaaaaaaa aaaaaaaaaa aaaaaaaaaa aaaaaaaaaa aaaaaaaaaa | |
| | | aaaaaaaaaa aaaaaaaaaa aaaaaaaaaa aaaaaaaaaa aaaaaaaaaa | |
| | | aaaaaaaaaa aaaaaaaaaa aaaaaaaaaa aaaaaaaaaa aaaaaaaaaa | |
| | | aaaaaaaaaa aaaaaaaaaa aaaaaaaaaa aaaaaaaaaa aaaaaaaaaa | |
| | | aaaaaaaaaa aaaaaaaaaa aaaaaaaaaa aaaaaaaaaa aaaaaaaaaa | |
| | | aaaaaaaaaa aaaaaaaaaa aaaaaaaaaa aaaaaaaaaa aaaaaaaaaa | |
| | | aaaaaaaaaa aaaaaaaaaa aaaaaaaaaa aaaaaaaaaa aaaaaaaaaa | |
| | | aaaaaaaaaa aaaaaaaaaa aaaaaaaaaa aaaaaaaaaa aaaaaaaaaa | |
| | | aaaaaaaaaa aaaaaaaaaa aaaaaaaaaa aaaaaaaaaa aaaaaaaaaa | |
| | | aaaaaaaaaa aaaaaaaaaa aaaaaaaaaa aaaaaaaaaa aaaaaaaaaa | |
| | | aaaaaaaaaa aaaaaaaaaa aaaaaaaaaa aaaaaaaaaa aaaaaaaaaa | |
| | | aaaaaaaaaa aaaaaaaaaa aaaaaaaaaa aaaaaaaaaa aaaaaaaaaa | |
| | | aaaaaaaaaa aaaaaaaaaa aaaaaaaaaa aaaaaaaaaa aaaaaaaaaa | |
| | | aaaaaaaaaa aaaaaaaaaa aaaaaaaaaa aaaaaaaaaa aaaaaaaaaa | |
| | | aaaaaaaaaa aaaaaaaaaa aaaaaaaaaa aaaaaaaaaa aaaaaaaaaa | |
| | | aaaaaaaaaa aaaaaaaaaa aaaaaaaaaa aaaaaaaaaa aaaaaaaaaa | |
| | | aaaaaaaaaa aaaaaaaaaa aaaaaaaaaa aaaaaaaaaa aaaaaaaaaa | |
| | | aaaaaaaaaa aaaaaaaaaa aaaaaaaaaa aaaaaaaaaa aaaaaaaaaa | |
| | | aaaaaaaaaa aaaaaaaaaa aaaaaaaaaa aaaaaaaaaa aaaaaaaaaa | |
| | | aaaaaaaaaa aaaaaaaaaa aaaaaaaaaa aaaaaaaaaa aaaaaaaaaa | |
| | | aaaaaaaaaa aaaaaaaaaa aaaaaaaaaa aaaaaaaaaa aaaaaaaaaa | |
| | | aaaaaaaaaa aaaaaaaaaa aaaaaaaaaa aaaaaaaaaa aaaaaaaaaa | |
| | | aaaaaaaaaa aaaaaaaaaa aaaaaaaaaa aaaaaaaaaa aaaaaaaaaa | |
| | | aaaaaaaaaa aaaaaaaaaa aaaaaaaaaa aaaaaaaaaa aaaaaaaaaa | |
| | | aaaaaaaaaa aaaaaaaaaa aaaaaaaaaa aaaaaaaaaa aaaaaaaaaa | |
| | | aaaaaaaaaa aaaaaaaaaa aaaaaaaaaa aaaaaaaaaa aaaaaaaaaa | |
| | | aaaaaaaaaa aaaaaaaaaa aaaaaaaaaa aaaaaaaaaa aaaaaaaaaa | |
| | | aaaaaaaaaa aaaaaaaaaa aaaaaaaaaa aaaaaaaaaa aaaaaaaaaa | |
| | | aaaaaaaaaa aaaaaaaaaa aaaaaaaaaa aaaaaaaaaa aaaaaaaaaa | |
| | | aaaaaaaaaa aaaaaaaaaa aaaaaaaaaa aaaaaaaaaa aaaaaaaaaa | |
| | | aaaaaaaaaa aaaaaaaaaa aaaaaaaaaa aaaaaaaaaa aaaaaaaaaa | |
| | | aaaaaaaaaa aaaaaaaaaa aaaaaaaaaa aaaaaaaaaa aaaaaaaaaa | |
| | | aaaaaaaaaa aaaaaaaaaa aaaaaaaaaa aaaaaaaaaa aaaaaaaaaa | |
| | | aaaaaaaaaa aaaaaaaaaa aaaaaaaaaa aaaaaaaaaa aaaaaaaaaa | |
| | | aaaaaaaaaa aaaaaaaaaa aaaaaaaaaa aaaaaaaaaa aaaaaaaaaa | |
| | | aaaaaaaaaa aaaaaaaaaa aaaaaaaaaa aaaaaaaaaa aaaaaaaaaa | |
| | | aaaaaaaaaa aaaaaaaaaa aaaaaaaaaa aaaaaaaaaa aaaaaaaaaa | |
| | | aaaaaaaaaa aaaaaaaaaa aaaaaaaaaa aaaaaaaaaa aaaaaaaaaa | |
| | | aaaaaaaaaa aaaaaaaaaa aaaaaaaaaa aaaaaaaaaa aaaaaaaaaa | |
| | | aaaaaaaaaa aaaaaaaaaa aaaaaaaaaa aaaaaaaaaa aaaaaaaaaa | |
| | | aaaaaaaaaa aaaaaaaaaa aaaaaaaaaa aaaaaaaaaa aaaaaaaaaa | |
| | | aaaaaaaaaa aaaaaaaaaa aaaaaaaaaa aaaaaaaaaa aaaaaaaaaa | |
| | | aaaaaaaaaa aaaaaaaaaa aaaaaaaaaa aaaaaaaaaa aaaaaaaaaa | |
| | | aaaaaaaaaa aaaaaaaaaa aaaaaaaaaa aaaaaaaaaa aaaaaaaaaa | |
| | | aaaaaaaaaa aaaaaaaaaa aaaaaaaaaa aaaaaaaaaa aaaaaaaaaa | |
| | | aaaaaaaaaa aaaaaaaaaa aaaaaaaaaa aaaaaaaaaa aaaaaaaaaa | |
| | | aaaaaaaaaa aaaaaaaaaa aaaaaaaaaa aaaaaaaaaa aaaaaaaaaa | |
| | | aaaaaaaaaa aaaaaaaaaa aaaaaaaaaa aaaaaaaaaa aaaaaaaaaa | |
| | | aaaaaaaaaa aaaaaaaaaa aaaaaaaaaa aaaaaaaaaa aaaaaaaaaa | |
| | | aaaaaaaaaa aaaaaaaaaa aaaaaaaaaa aaaaaaaaaa aaaaaaaaaa | |
| | | aaaaaaaaaa aaaaaaaaaa aaaaaaaaaa aaaaaaaaaa aaaaaaaaaa | |
| | | aaaaaaaaaa aaaaaaaaaa aaaaaaaaaa aaaaaaaaaa aaaaaaaaaa | |
| | | aaaaaaaaaa aaaaaaaaaa aaaaaaaaaa aaaaaaaaaa aaaaaaaaaa | |
| | | aaaaaaaaaa aaaaaaaaaa aaaaaaaaaa aaaaaaaaaa aaaaaaaaaa | |
| | | aaaaaaaaaa aaaaaaaaaa aaaaaaaaaa aaaaaaaaaa aaaaaaaaaa | |
| | | aaaaaaaaaa aaaaaaaaaa aaaaaaaaaa aaaaaaaaaa aaaaaaaaaa | |
| | | aaaaaaaaaa aaaaaaaaaa aaaaaaaaaa aaaaaaaaaa aaaaaaaaaa | |
| | | aaaaaaaaaa aaaaaaaaaa aaaaaaaaaa aaaaaaaaaa aaaaaaaaaa | |
| | | aaaaaaaaaa aaaaaaaaaa aaaaaaaaaa aaaaaaaaaa aaaaaaaaaa | |
| | | aaaaaaaaaa aaaaaaaaaa aaaaaaaaaa aaaaaaaaaa aaaaaaaaaa | |
| | | aaaaaaaaaa aaaaaaaaaa aaaaaaaaaa aaaaaaaaaa aaaaaaaaaa | |
| | | aaaaaaaaaa aaaaaaaaaa aaaaaaaaaa aaaaaaaaaa aaaaaaaaaa | |
| | | aaaaaaaaaa aaaaaaaaaa aaaaaaaaaa aaaaaaaaaa aaaaaaaaaa | |
| | | aaaaaaaaaa aaaaaaaaaa aaaaaaaaaa aaaaaaaaaa aaaaaaaaaa | |
| | | aaaaaaaaaa aaaaaaaaaa aaaaaaaaaa aaaaaaaaaa aaaaaaaaaa | |
| | | aaaaaaaaaa aaaaaaaaaa aaaaaaaaaa aaaaaaaaaa aaaaaaaaaa | |
| | | aaaaaaaaaa aaaaaaaaaa aaaaaaaaaa aaaaaaaaaa aaaaaaaaaa | |
| | | aaaaaaaaaa aaaaaaaaaa aaaaaaaaaa aaaaaaaaaa aaaaaaaaaa | |
| | | aaaaaaaaaa aaaaaaaaaa aaaaaaaaaa aaaaaaaaaa aaaaaaaaaa | |
| | | aaaaaaaaaa aaaaaaaaaa aaaaaaaaaa aaaaaaaaaa aaaaaaaaaa | |
| | | aaaaaaaaaa aaaaaaaaaa aaaaaaaaaa aaaaaaaaaa aaaaaaaaaa | |
| | | aaaaaaaaaa aaaaaaaaaa aaaaaaaaaa aaaaaaaaaa aaaaaaaaaa | |
| | | aaaaaaaaaa aaaaaaaaaa aaaaaaaaaa aaaaaaaaaa aaaaaaaaaa | |
| | | aaaaaaaaaa aaaaaaaaaa aaaaaaaaaa aaaaaaaaaa aaaaaaaaaa | |
| | | aaaaaaaaaa aaaaaaaaaa aaaaaaaaaa aaaaaaaaaa aaaaaaaaaa | |
| | | aaaaaaaaaa aaaaaaaaaa aaaaaaaaaa aaaaaaaaaa aaaaaaaaaa | |
| | | aaaaaaaaaa aaaaaaaaaa aaaaaaaaaa aaaaaaaaaa aaaaaaaaaa | |
| | | aaaaaaaaaa aaaaaaaaaa aaaaaaaaaa aaaaaaaaaa aaaaaaaaaa | |
| | | aaaaaaaaaa aaaaaaaaaa aaaaaaaaaa aaaaaaaaaa aaaaaaaaaa | |
| | | aaaaaaaaaa aaaaaaaaaa aaaaaaaaaa aaaaaaaaaa aaaaaaaaaa | |
| | | aaaaaaaaaa aaaaaaaaaa aaaaaaaaaa aaaaaaaaaa aaaaaaaaaa | |
| | | aaaaaaaaaa aaaaaaaaaa aaaaaaaaaa aaaaaaaaaa aaaaaaaaaa | |
| | | aaaaaaaaaa aaaaaaaaaa aaaaaaaaaa aaaaaaaaaa aaaaaaaaaa | |
| | | aaaaaaaaaa aaaaaaaaaa aaaaaaaaaa aaaaaaaaaa aaaaaaaaaa | |
| | | aaaaaaaaaa aaaaaaaaaa aaaaaaaaaa aaaaaaaaaa aaaaaaaaaa | |
| 35 | polyA | tttttttttt tttttttttt tttttttttt tttttttttt tttttttttt tttttttttt tttttttttt | 110 |
| | | tttttttttt tttttttttt tttttttttt | |
| 36 | polyA | tttttttttt tttttttttt tttttttttt tttttttttt tttttttttt tttttttttt tttttttttt | 111 |
| | | tttttttttt tttttttttt tttttttttt tttttttttt tttttttttt tttttttttt tttttttttt | |
| | | tttttttttt tttttttttt tttttttttt tttttttttt tttttttttt tttttttttt tttttttttt | |
| | | tttttttttt tttttttttt tttttttttt tttttttttt tttttttttt tttttttttt tttttttttt | |
| | | tttttttttt tttttttttt tttttttttt tttttttttt tttttttttt tttttttttt tttttttttt | |
| | | tttttttttt tttttttttt tttttttttt tttttttttt tttttttttt tttttttttt tttttttttt | |
| | | tttttttttt tttttttttt tttttttttt tttttttttt tttttttttt tttttttttt tttttttttt | |
| | | tttttttttt tttttttttt tttttttttt tttttttttt tttttttttt tttttttttt tttttttttt | |
| | | tttttttttt tttttttttt tttttttttt tttttttttt tttttttttt tttttttttt tttttttttt | |
| | | tttttttttt tttttttttt tttttttttt tttttttttt tttttttttt tttttttttt tttttttttt | |
| | | tttttttttt tttttttttt tttttttttt tttttttttt tttttttttt tttttttttt tttttttttt | |
| | | tttttttttt tttttttttt tttttttttt tttttttttt tttttttttt tttttttttt tttttttttt | |
| | | tttttttttt tttttttttt tttttttttt tttttttttt tttttttttt tttttttttt tttttttttt | |
| | | tttttttttt tttttttttt tttttttttt tttttttttt tttttttttt tttttttttt tttttttttt | |
| | | tttttttttt tttttttttt tttttttttt tttttttttt tttttttttt tttttttttt tttttttttt | |
| | | tttttttttt tttttttttt tttttttttt tttttttttt tttttttttt tttttttttt tttttttttt | |
| | | tttttttttt tttttttttt tttttttttt tttttttttt tttttttttt tttttttttt tttttttttt | |
| | | tttttttttt tttttttttt tttttttttt tttttttttt tttttttttt tttttttttt tttttttttt | |
| | | tttttttttt tttttttttt tttttttttt tttttttttt tttttttttt tttttttttt tttttttttt | |
| | | tttttttttt tttttttttt tttttttttt tttttttttt tttttttttt tttttttttt tttttttttt | |
| | | tttttttttt tttttttttt tttttttttt tttttttttt tttttttttt tttttttttt tttttttttt | |
| | | tttttttttt tttttttttt tttttttttt tttttttttt tttttttttt tttttttttt tttttttttt | |
| | | tttttttttt tttttttttt tttttttttt tttttttttt tttttttttt tttttttttt tttttttttt | |
| | | tttttttttt tttttttttt tttttttttt tttttttttt tttttttttt tttttttttt tttttttttt | |
| | | tttttttttt tttttttttt tttttttttt tttttttttt tttttttttt tttttttttt tttttttttt | |
| | | tttttttttt tttttttttt tttttttttt tttttttttt tttttttttt tttttttttt tttttttttt | |
| | | tttttttttt tttttttttt tttttttttt tttttttttt tttttttttt tttttttttt tttttttttt | |
| | | tttttttttt tttttttttt tttttttttt tttttttttt tttttttttt tttttttttt tttttttttt | |
| | | tttttttttt tttttttttt tttttttttt tttttttttt tttttttttt tttttttttt tttttttttt | |
| | | tttttttttt tttttttttt tttttttttt tttttttttt tttttttttt tttttttttt tttttttttt | |
| | | tttttttttt tttttttttt tttttttttt tttttttttt tttttttttt tttttttttt tttttttttt | |
| | | tttttttttt tttttttttt tttttttttt tttttttttt tttttttttt tttttttttt tttttttttt | |
| | | tttttttttt tttttttttt tttttttttt tttttttttt tttttttttt tttttttttt tttttttttt | |
| | | tttttttttt tttttttttt tttttttttt tttttttttt tttttttttt tttttttttt tttttttttt | |
| | | tttttttttt tttttttttt tttttttttt tttttttttt tttttttttt tttttttttt tttttttttt | |
| | | tttttttttt tttttttttt tttttttttt tttttttttt tttttttttt tttttttttt tttttttttt | |
| | | tttttttttt tttttttttt tttttttttt tttttttttt tttttttttt tttttttttt tttttttttt | |
| | | tttttttttt tttttttttt tttttttttt tttttttttt tttttttttt tttttttttt tttttttttt | |
| | | tttttttttt tttttttttt tttttttttt tttttttttt tttttttttt tttttttttt tttttttttt | |
| | | tttttttttt tttttttttt tttttttttt tttttttttt tttttttttt tttttttttt tttttttttt | |
| | | tttttttttt tttttttttt tttttttttt tttttttttt tttttttttt tttttttttt tttttttttt | |
| | | tttttttttt tttttttttt tttttttttt tttttttttt tttttttttt tttttttttt tttttttttt | |
| | | tttttttttt tttttttttt tttttttttt tttttttttt tttttttttt tttttttttt tttttttttt | |
| | | tttttttttt tttttttttt tttttttttt tttttttttt tttttttttt tttttttttt tttttttttt | |
| | | tttttttttt tttttttttt tttttttttt tttttttttt tttttttttt tttttttttt tttttttttt | |
| | | tttttttttt tttttttttt tttttttttt tttttttttt tttttttttt tttttttttt tttttttttt | |
| | | tttttttttt tttttttttt tttttttttt tttttttttt tttttttttt tttttttttt tttttttttt | |
| | | tttttttttt tttttttttt tttttttttt tttttttttt tttttttttt tttttttttt tttttttttt | |
| | | tttttttttt tttttttttt tttttttttt tttttttttt tttttttttt tttttttttt tttttttttt | |
| | | tttttttttt tttttttttt tttttttttt tttttttttt tttttttttt tttttttttt tttttttttt | |
| | | tttttttttt tttttttttt tttttttttt tttttttttt tttttttttt tttttttttt tttttttttt | |
| | | tttttttttt tttttttttt tttttttttt tttttttttt tttttttttt tttttttttt tttttttttt | |
| | | tttttttttt tttttttttt tttttttttt tttttttttt tttttttttt tttttttttt tttttttttt | |
| | | tttttttttt tttttttttt tttttttttt tttttttttt tttttttttt tttttttttt tttttttttt | |
| | | tttttttttt tttttttttt tttttttttt tttttttttt tttttttttt tttttttttt tttttttttt | |
| | | tttttttttt tttttttttt tttttttttt tttttttttt tttttttttt tttttttttt tttttttttt | |
| | | tttttttttt tttttttttt tttttttttt tttttttttt tttttttttt tttttttttt tttttttttt | |
| | | tttttttttt tttttttttt tttttttttt tttttttttt tttttttttt tttttttttt tttttttttt | |
| | | tttttttttt tttttttttt tttttttttt tttttttttt tttttttttt tttttttttt tttttttttt | |
| | | tttttttttt tttttttttt tttttttttt tttttttttt tttttttttt tttttttttt tttttttttt | |
| | | tttttttttt tttttttttt tttttttttt tttttttttt tttttttttt tttttttttt tttttttttt | |
| | | tttttttttt tttttttttt tttttttttt tttttttttt tttttttttt tttttttttt tttttttttt | |
| | | tttttttttt tttttttttt tttttttttt tttttttttt tttttttttt tttttttttt tttttttttt | |
| | | tttttttttt tttttttttt tttttttttt tttttttttt tttttttttt tttttttttt tttttttttt | |
| | | tttttttttt tttttttttt tttttttttt tttttttttt tttttttttt tttttttttt tttttttttt | |
| | | tttttttttt tttttttttt tttttttttt tttttttttt tttttttttt tttttttttt tttttttttt | |
| | | tttttttttt tttttttttt tttttttttt tttttttttt tttttttttt tttttttttt tttttttttt | |
| | | tttttttttt tttttttttt tttttttttt tttttttttt tttttttttt tttttttttt tttttttttt | |
| | | tttttttttt tttttttttt tttttttttt tttttttttt tttttttttt tttttttttt tttttttttt | |
| | | tttttttttt tttttttttt tttttttttt tttttttttt tttttttttt tttttttttt tttttttttt | |
| | | tttttttttt tttttttttt tttttttttt tttttttttt tttttttttt tttttttttt tttttttttt | |
| | | tttttttttt tttttttttt tttttttttt | |
| 37 | polyA | aaaaaaaaaa aaaaaaaaaa aaaaaaaaaa aaaaaaaaaa aaaaaaaaaa | 112 |
| | | aaaaaaaaaa aaaaaaaaaa aaaaaaaaaa aaaaaaaaaa aaaaaaaaaa | |
| | | aaaaaaaaaa aaaaaaaaaa aaaaaaaaaa aaaaaaaaaa aaaaaaaaaa | |
| | | aaaaaaaaaa aaaaaaaaaa aaaaaaaaaa aaaaaaaaaa aaaaaaaaaa | |
| | | aaaaaaaaaa aaaaaaaaaa aaaaaaaaaa aaaaaaaaaa aaaaaaaaaa | |
| | | aaaaaaaaaa aaaaaaaaaa aaaaaaaaaa aaaaaaaaaa aaaaaaaaaa | |
| | | aaaaaaaaaa aaaaaaaaaa aaaaaaaaaa aaaaaaaaaa aaaaaaaaaa | |
| | | aaaaaaaaaa aaaaaaaaaa aaaaaaaaaa aaaaaaaaaa aaaaaaaaaa | |
| | | aaaaaaaaaa aaaaaaaaaa aaaaaaaaaa aaaaaaaaaa aaaaaaaaaa | |
| | | aaaaaaaaaa aaaaaaaaaa aaaaaaaaaa aaaaaaaaaa aaaaaaaaaa | |
| | | aaaaaaaaaa aaaaaaaaaa aaaaaaaaaa aaaaaaaaaa aaaaaaaaaa | |
| | | aaaaaaaaaa aaaaaaaaaa aaaaaaaaaa aaaaaaaaaa aaaaaaaaaa | |
| | | aaaaaaaaaa aaaaaaaaaa aaaaaaaaaa aaaaaaaaaa aaaaaaaaaa | |
| | | aaaaaaaaaa aaaaaaaaaa aaaaaaaaaa aaaaaaaaaa aaaaaaaaaa | |
| | | aaaaaaaaaa aaaaaaaaaa aaaaaaaaaa aaaaaaaaaa aaaaaaaaaa | |
| | | aaaaaaaaaa aaaaaaaaaa aaaaaaaaaa aaaaaaaaaa aaaaaaaaaa | |
| | | aaaaaaaaaa aaaaaaaaaa aaaaaaaaaa aaaaaaaaaa aaaaaaaaaa | |
| | | aaaaaaaaaa aaaaaaaaaa aaaaaaaaaa aaaaaaaaaa aaaaaaaaaa | |
| | | aaaaaaaaaa aaaaaaaaaa aaaaaaaaaa aaaaaaaaaa aaaaaaaaaa | |
| | | aaaaaaaaaa aaaaaaaaaa aaaaaaaaaa aaaaaaaaaa aaaaaaaaaa | |
| | | aaaaaaaaaa aaaaaaaaaa aaaaaaaaaa aaaaaaaaaa aaaaaaaaaa | |
| | | aaaaaaaaaa aaaaaaaaaa aaaaaaaaaa aaaaaaaaaa aaaaaaaaaa | |
| | | aaaaaaaaaa aaaaaaaaaa aaaaaaaaaa aaaaaaaaaa aaaaaaaaaa | |
| | | aaaaaaaaaa aaaaaaaaaa aaaaaaaaaa aaaaaaaaaa aaaaaaaaaa | |
| | | aaaaaaaaaa aaaaaaaaaa aaaaaaaaaa aaaaaaaaaa aaaaaaaaaa | |
| | | aaaaaaaaaa aaaaaaaaaa aaaaaaaaaa aaaaaaaaaa aaaaaaaaaa | |
| | | aaaaaaaaaa aaaaaaaaaa aaaaaaaaaa aaaaaaaaaa aaaaaaaaaa | |
| | | aaaaaaaaaa aaaaaaaaaa aaaaaaaaaa aaaaaaaaaa aaaaaaaaaa | |
| | | aaaaaaaaaa aaaaaaaaaa aaaaaaaaaa aaaaaaaaaa aaaaaaaaaa | |
| | | aaaaaaaaaa aaaaaaaaaa aaaaaaaaaa aaaaaaaaaa aaaaaaaaaa | |
| | | aaaaaaaaaa aaaaaaaaaa aaaaaaaaaa aaaaaaaaaa aaaaaaaaaa | |
| | | aaaaaaaaaa aaaaaaaaaa aaaaaaaaaa aaaaaaaaaa aaaaaaaaaa | |
| | | aaaaaaaaaa aaaaaaaaaa aaaaaaaaaa aaaaaaaaaa aaaaaaaaaa | |
| | | aaaaaaaaaa aaaaaaaaaa aaaaaaaaaa aaaaaaaaaa aaaaaaaaaa | |
| | | aaaaaaaaaa aaaaaaaaaa aaaaaaaaaa aaaaaaaaaa aaaaaaaaaa | |
| | | aaaaaaaaaa aaaaaaaaaa aaaaaaaaaa aaaaaaaaaa aaaaaaaaaa | |
| | | aaaaaaaaaa aaaaaaaaaa aaaaaaaaaa aaaaaaaaaa aaaaaaaaaa | |
| | | aaaaaaaaaa aaaaaaaaaa aaaaaaaaaa aaaaaaaaaa aaaaaaaaaa | |
| | | aaaaaaaaaa aaaaaaaaaa aaaaaaaaaa aaaaaaaaaa aaaaaaaaaa | |
| | | aaaaaaaaaa aaaaaaaaaa aaaaaaaaaa aaaaaaaaaa aaaaaaaaaa | |
| | | aaaaaaaaaa aaaaaaaaaa aaaaaaaaaa aaaaaaaaaa aaaaaaaaaa | |
| | | aaaaaaaaaa aaaaaaaaaa aaaaaaaaaa aaaaaaaaaa aaaaaaaaaa | |
| | | aaaaaaaaaa aaaaaaaaaa aaaaaaaaaa aaaaaaaaaa aaaaaaaaaa | |
| | | aaaaaaaaaa aaaaaaaaaa aaaaaaaaaa aaaaaaaaaa aaaaaaaaaa | |
| | | aaaaaaaaaa aaaaaaaaaa aaaaaaaaaa aaaaaaaaaa aaaaaaaaaa | |
| | | aaaaaaaaaa aaaaaaaaaa aaaaaaaaaa aaaaaaaaaa aaaaaaaaaa | |
| | | aaaaaaaaaa aaaaaaaaaa aaaaaaaaaa aaaaaaaaaa aaaaaaaaaa | |
| | | aaaaaaaaaa aaaaaaaaaa aaaaaaaaaa aaaaaaaaaa aaaaaaaaaa | |
| | | aaaaaaaaaa aaaaaaaaaa aaaaaaaaaa aaaaaaaaaa aaaaaaaaaa | |
| | | aaaaaaaaaa aaaaaaaaaa aaaaaaaaaa aaaaaaaaaa aaaaaaaaaa | |
| | | aaaaaaaaaa aaaaaaaaaa aaaaaaaaaa aaaaaaaaaa aaaaaaaaaa | |
| | | aaaaaaaaaa aaaaaaaaaa aaaaaaaaaa aaaaaaaaaa aaaaaaaaaa | |
| | | aaaaaaaaaa aaaaaaaaaa aaaaaaaaaa aaaaaaaaaa aaaaaaaaaa | |
| | | aaaaaaaaaa aaaaaaaaaa aaaaaaaaaa aaaaaaaaaa aaaaaaaaaa | |
| | | aaaaaaaaaa aaaaaaaaaa aaaaaaaaaa aaaaaaaaaa aaaaaaaaaa | |
| | | aaaaaaaaaa aaaaaaaaaa aaaaaaaaaa aaaaaaaaaa aaaaaaaaaa | |
| | | aaaaaaaaaa aaaaaaaaaa aaaaaaaaaa aaaaaaaaaa aaaaaaaaaa | |
| | | aaaaaaaaaa aaaaaaaaaa aaaaaaaaaa aaaaaaaaaa aaaaaaaaaa | |
| | | aaaaaaaaaa aaaaaaaaaa aaaaaaaaaa aaaaaaaaaa aaaaaaaaaa | |
| | | aaaaaaaaaa aaaaaaaaaa aaaaaaaaaa aaaaaaaaaa aaaaaaaaaa | |
| | | aaaaaaaaaa aaaaaaaaaa aaaaaaaaaa aaaaaaaaaa aaaaaaaaaa | |
| | | aaaaaaaaaa aaaaaaaaaa aaaaaaaaaa aaaaaaaaaa aaaaaaaaaa | |
| | | aaaaaaaaaa aaaaaaaaaa aaaaaaaaaa aaaaaaaaaa aaaaaaaaaa | |
| | | aaaaaaaaaa aaaaaaaaaa aaaaaaaaaa aaaaaaaaaa aaaaaaaaaa | |
| | | aaaaaaaaaa aaaaaaaaaa aaaaaaaaaa aaaaaaaaaa aaaaaaaaaa | |
| | | aaaaaaaaaa aaaaaaaaaa aaaaaaaaaa aaaaaaaaaa aaaaaaaaaa | |
| | | aaaaaaaaaa aaaaaaaaaa aaaaaaaaaa aaaaaaaaaa aaaaaaaaaa | |
| | | aaaaaaaaaa aaaaaaaaaa aaaaaaaaaa aaaaaaaaaa aaaaaaaaaa | |
| | | aaaaaaaaaa aaaaaaaaaa aaaaaaaaaa aaaaaaaaaa aaaaaaaaaa | |
| | | aaaaaaaaaa aaaaaaaaaa aaaaaaaaaa aaaaaaaaaa aaaaaaaaaa | |
| | | aaaaaaaaaa aaaaaaaaaa aaaaaaaaaa aaaaaaaaaa aaaaaaaaaa | |
| | | aaaaaaaaaa aaaaaaaaaa aaaaaaaaaa aaaaaaaaaa aaaaaaaaaa | |
| | | aaaaaaaaaa aaaaaaaaaa aaaaaaaaaa aaaaaaaaaa aaaaaaaaaa | |
| | | aaaaaaaaaa aaaaaaaaaa aaaaaaaaaa aaaaaaaaaa aaaaaaaaaa | |
| | | aaaaaaaaaa aaaaaaaaaa aaaaaaaaaa aaaaaaaaaa aaaaaaaaaa | |
| | | aaaaaaaaaa aaaaaaaaaa aaaaaaaaaa aaaaaaaaaa aaaaaaaaaa | |
| | | aaaaaaaaaa aaaaaaaaaa aaaaaaaaaa aaaaaaaaaa aaaaaaaaaa | |
| | | aaaaaaaaaa aaaaaaaaaa aaaaaaaaaa aaaaaaaaaa aaaaaaaaaa | |
| | | aaaaaaaaaa aaaaaaaaaa aaaaaaaaaa aaaaaaaaaa aaaaaaaaaa | |
| | | aaaaaaaaaa aaaaaaaaaa aaaaaaaaaa aaaaaaaaaa aaaaaaaaaa | |
| | | aaaaaaaaaa aaaaaaaaaa aaaaaaaaaa aaaaaaaaaa aaaaaaaaaa | |
| | | aaaaaaaaaa aaaaaaaaaa aaaaaaaaaa aaaaaaaaaa aaaaaaaaaa | |
| | | aaaaaaaaaa aaaaaaaaaa aaaaaaaaaa aaaaaaaaaa aaaaaaaaaa | |
| | | aaaaaaaaaa aaaaaaaaaa aaaaaaaaaa aaaaaaaaaa aaaaaaaaaa | |
| | | aaaaaaaaaa aaaaaaaaaa aaaaaaaaaa aaaaaaaaaa aaaaaaaaaa | |
| | | aaaaaaaaaa aaaaaaaaaa aaaaaaaaaa aaaaaaaaaa aaaaaaaaaa | |
| | | aaaaaaaaaa aaaaaaaaaa aaaaaaaaaa aaaaaaaaaa aaaaaaaaaa | |
| | | aaaaaaaaaa aaaaaaaaaa aaaaaaaaaa aaaaaaaaaa aaaaaaaaaa | |
| | | aaaaaaaaaa aaaaaaaaaa aaaaaaaaaa aaaaaaaaaa aaaaaaaaaa | |
| | | aaaaaaaaaa aaaaaaaaaa aaaaaaaaaa aaaaaaaaaa aaaaaaaaaa | |
| | | aaaaaaaaaa aaaaaaaaaa aaaaaaaaaa aaaaaaaaaa aaaaaaaaaa | |
| | | aaaaaaaaaa aaaaaaaaaa aaaaaaaaaa aaaaaaaaaa aaaaaaaaaa | |
| | | aaaaaaaaaa aaaaaaaaaa aaaaaaaaaa aaaaaaaaaa aaaaaaaaaa | |
| | | aaaaaaaaaa aaaaaaaaaa aaaaaaaaaa aaaaaaaaaa aaaaaaaaaa | |
| | | aaaaaaaaaa aaaaaaaaaa aaaaaaaaaa aaaaaaaaaa aaaaaaaaaa | |
| | | aaaaaaaaaa aaaaaaaaaa aaaaaaaaaa aaaaaaaaaa aaaaaaaaaa | |
| | | aaaaaaaaaa aaaaaaaaaa aaaaaaaaaa aaaaaaaaaa aaaaaaaaaa | |
| | | aaaaaaaaaa aaaaaaaaaa aaaaaaaaaa aaaaaaaaaa aaaaaaaaaa | |
| | | aaaaaaaaaa aaaaaaaaaa aaaaaaaaaa aaaaaaaaaa aaaaaaaaaa | |
| | | aaaaaaaaaa aaaaaaaaaa aaaaaaaaaa aaaaaaaaaa aaaaaaaaaa | |
| 38 | polyA | aaaaaaaaaa aaaaaaaaaa aaaaaaaaaa aaaaaaaaaa aaaaaaaaaa | 113 |
| | | aaaaaaaaaa aaaaaaaaaa aaaaaaaaaa aaaaaaaaaa aaaaaaaaaa | |
| | | aaaaaaaaaa aaaaaaaaaa aaaaaaaaaa aaaaaaaaaa aaaaaaaaaa | |
| | | aaaaaaaaaa aaaaaaaaaa aaaaaaaaaa aaaaaaaaaa aaaaaaaaaa | |
| | | aaaaaaaaaa aaaaaaaaaa aaaaaaaaaa aaaaaaaaaa aaaaaaaaaa | |
| | | aaaaaaaaaa aaaaaaaaaa aaaaaaaaaa aaaaaaaaaa aaaaaaaaaa | |
| | | aaaaaaaaaa aaaaaaaaaa aaaaaaaaaa aaaaaaaaaa aaaaaaaaaa | |
| | | aaaaaaaaaa aaaaaaaaaa aaaaaaaaaa aaaaaaaaaa aaaaaaaaaa | |
| 39 | PD1 CAR | Pgwfldspdrpwnpptfspallvvtegdnatftcsfsntsesfvlnwyrmspsnqtdkl | |
| | (aa) | aafpedrsqpgqdcrfrvtqlpngrdfhmsvvrarrndsgtylcgaislapkaqikeslra | |
| | | elrvterraevptahpspsprpagqfqtlvtttpaprpptpaptiasqplslrpeacrpaa | |
| | | ggavhtrgldfacdiyiwaplagtcgvlllslvitlyckrgrkkllyifkqpfmrpvqttqeed | |
| | | gcscrfpeeeeggcelrvkfsrsadapaykqgqnqlynelnlgrreeydvldkrrgrdpe | |
| | | mggkprrknpqeglynelqkdkmaeayseigmkgerrrgkghdglyqglstatkdty | |
| | | dalhmqalppr | |

### Cancer Associated Antigens

[0253] The present invention provides immune effector cells (e.g., T cells, NK cells) that are engineered to contain one or more CARs that direct the immune effector cells to cancer. This is achieved through an antigen binding domain on the CAR that is specific for a cancer associated antigen. There are two classes of cancer associated antigens (tumor antigens) that can be targeted by the CARs of the instant invention: (1) cancer associated antigens that are expressed on the surface of cancer cells; and (2) cancer associated antigens that itself is intracelluar, however, a fragment of such antigen (peptide) is presented on the surface of the cancer cells by MHC (major histocompatibility complex).

[0254] Accordingly, the present invention provides CARs that target the following cancer associated antigens (tumor antigens): CD19, CD123, CD22, CD30, CD171, CS-1, CLL-1 (CLECL1), CD33, EGFRvIII, GD2, GD3, BCMA, Tn Ag, PSMA, ROR1, FLT3, FAP, TAG72, CD38, CD44v6, CEA, EPCAM, B7H3, KIT, IL-13Ra2, Mesothelin, IL-11Ra, PSCA, VEGFR2, LewisY, CD24, PDGFR-beta, PRSS21, SSEA-4, CD20, Folate receptor alpha, ERBB2 (Her2/neu), MUC1, EGFR, NCAM, Prostase, PAP, ELF2M, Ephrin B2, IGF-I receptor, CAIX, LMP2, gp100, bcr-abl, tyrosinase, EphA2, Fucosyl GM1, sLe, GM3, TGS5, HMWMAA, o-acetyl-GD2, Folate receptor beta, TEM1/CD248, TEM7R, CLDN6, TSHR, GPRC5D, CXORF61, CD97, CD179a, ALK, Polysialic acid, PLAC1, GloboH, NY-BR-1, UPK2, HAVCR1, ADRB3, PANX3, GPR20, LY6K, OR51E2, TARP, WT1, NY-ESO-1, LAGE-1a, legumain, HPV E6, E7, MAGE-A1, MAGE A1, ETV6-AML, sperm protein 17, XAGE1, Tie 2, MAD-CT-1, MAD-CT-2, Fos-related antigen 1, p53, p53 mutant, prostein, survivin and telomerase, PCTA-1/Galectin 8, MelanA/MART1, Ras mutant, hTERT, sarcoma translocation breakpoints, ML-IAP, ERG (TMPRSS2 ETS fusion gene), NA17, PAX3, Androgen receptor, Cyclin B1, MYCN, RhoC, TRP-2, CYP1B1, BORIS, SART3, PAX5, OY-TES1, LCK, AKAP-4, SSX2, RAGE-1, human telomerase reverse transcriptase, RU1, RU2, intestinal carboxyl esterase, mut hsp70-2, CD79a, CD79b, CD72, LAIR1, FCAR, LTLRA2, CD300LF, CLEC12A, BST2, EMR2, LY75, GPC3, FCRL5, and IGLL1.

### Tumor-Supporting Antigens

[0255] A CAR described herein can comprise an antigen binding domain (e.g., antibody or antibody fragment, TCR or TCR fragment) that binds to a tumor-supporting antigen (e.g., a tumor-supporting antigen as described herein). In some embodiments, the tumor-supporting antigen is an antigen present on a stromal cell or a myeloid-derived suppressor cell (MDSC). Stromal cells can secrete growth factors to promote cell division in the microenvironment. MDSC cells can inhibit T cell proliferation and activation. Without wishing to be bound by theory, in some embodiments, the CAR-expressing cells destroy the tumor-supporting cells, thereby indirectly inhibiting tumor growth or survival.

[0256] In embodiments, the stromal cell antigen is chosen from one or more of: bone marrow stromal cell antigen 2 (BST2), fibroblast activation protein (FAP) and tenascin. In an embodiment, the FAP-specific antibody is, competes for binding with, or has the same CDRs as, sibrotuzumab. In embodiments, the MDSC antigen is chosen from one or more of: CD33, CD11b, C14, CD15, and CD66b. Accordingly, in some embodiments, the tumor-supporting antigen is chosen from one or more of: bone marrow stromal cell antigen 2 (BST2), fibroblast activation protein (FAP) or tenascin, CD33, CD11b, C14, CD15, and CD66b.

### Chimeric Antigen Receptor (CAR)

[0257] The present invention encompasses a recombinant DNA construct comprising sequences encoding a CAR, wherein the CAR comprises an antigen binding domain (e.g., antibody or antibody fragment, TCR or TCR fragment) that binds specifically to a cancer associated antigen described herein, wherein the sequence of the antigen binding domain is contiguous with and in the same reading frame as a nucleic acid sequence encoding an intracellular signaling domain. The intracellular signaling domain can comprise a costimulatory signaling domain and/or a primary signaling domain, e.g., a zeta chain. The costimulatory signaling domain refers to a portion of the CAR comprising at least a portion of the intracellular domain of a costimulatory molecule.

[0258] In specific aspects, a CAR construct of the invention comprises a scFv domain, wherein the scFv may be preceded by an optional leader sequence such as provided in SEQ ID NO: 2, and followed by an optional hinge sequence such as provided in SEQ ID NO:4 or SEQ ID NO:6 or SEQ ID NO:8 or SEQ ID NO:10, a transmembrane region such as provided in SEQ ID NO:12, an intracellular signalling domain that includes SEQ ID NO:14 or SEQ ID NO:16 and a CD3 zeta sequence that includes SEQ ID NO:18 or SEQ ID NO:20, e.g., wherein the domains are contiguous with and in the same reading frame to form a single fusion protein.

[0259] In one aspect, an exemplary CAR constructs comprise an optional leader sequence (e.g., a leader sequence described herein), an extracellular antigen binding domain (e.g., an antigen binding domain described herein), a hinge (e.g., a hinge region described herein), a transmembrane domain (e.g., a transmembrane domain described herein), and an intracellular stimulatory domain (e.g., an intracellular stimulatory domain described herein). In one aspect, an exemplary CAR construct comprises an optional leader sequence (e.g., a leader sequence described herein), an extracellular antigen binding domain (e.g., an antigen binding domain described herein), a hinge (e.g., a hinge region described herein), a transmembrane domain (e.g., a transmembrane domain described herein), an intracellular costimulatory signaling domain (e.g., a costimulatory signaling domain described herein) and/or an intracellular primary signaling domain (e.g., a primary signaling domain described herein).

[0260] An exemplary leader sequence is provided as SEQ ID NO: 2. An exemplary hinge/spacer sequence is provided as SEQ ID NO: 4 or SEQ ID NO:6 or SEQ ID NO:8 or SEQ ID NO:10. An exemplary transmembrane domain sequence is provided as SEQ ID NO:12. An exemplary sequence of the intracellular signaling domain of the 4-1BB protein is provided as SEQ ID NO: 14. An exemplary sequence of the intracellular signaling domain of CD27 is provided as SEQ ID NO:16. An exemplary CD3zeta domain sequence is provided as SEQ ID NO: 18 or SEQ ID NO:20.

[0261] In one aspect, the present invention encompasses a recombinant nucleic acid construct comprising a nucleic acid molecule encoding a CAR, wherein the nucleic acid molecule comprises the nucleic acid sequence encoding an antigen binding domain, e.g., described herein, that is contiguous with and in the same reading frame as a nucleic acid sequence encoding an intracellular signaling domain.

[0262] In one aspect, the present invention encompasses a recombinant nucleic acid construct comprising a nucleic acid molecule encoding a CAR, wherein the nucleic acid molecule comprises a nucleic acid sequence encoding an antigen binding domain, wherein the sequence is contiguous with and in the same reading frame as the nucleic acid sequence encoding an intracellular signaling domain. An exemplary intracellular signaling domain that can be used in the CAR includes, but is not limited to, one or more intracellular signaling domains of, e.g., CD3-zeta, CD28, CD27, 4-1BB, and the like. In some instances, the CAR can comprise any combination of CD3-zeta, CD28, 4-1BB, and the like.

[0263] The nucleic acid sequences coding for the desired molecules can be obtained using recombinant methods known in the art, such as, for example by screening libraries from cells expressing the nucleic acid molecule, by deriving the nucleic acid molecule from a vector known to include the same, or by isolating directly from cells and tissues containing the same, using standard techniques. Alternatively, the nucleic acid of interest can be produced synthetically, rather than cloned.

[0264] The present invention includes retroviral and lentiviral vector constructs expressing a CAR that can be directly transduced into a cell.

[0265] The present invention also includes an RNA construct that can be directly transfected into a cell. A method for generating mRNA for use in transfection involves in vitro transcription (IVT) of a template with specially designed primers, followed by polyA addition, to produce a construct containing 3′ and 5′ untranslated sequence (“UTR”) (e.g., a 3′ and/or 5′ UTR described herein), a 5′ cap (e.g., a 5′ cap described herein) and/or Internal Ribosome Entry Site (IRES) (e.g., an IRES described herein), the nucleic acid to be expressed, and a polyA tail, typically 50-2000 bases in length (SEQ ID NO:32). RNA so produced can efficiently transfect different kinds of cells. In one embodiment, the template includes sequences for the CAR. In an embodiment, an RNA CAR vector is transduced into a cell, e.g., a T cell or a NK cell, by electroporation.

[0266] Antigen Binding Domain

[0267] In one aspect, the CAR of the invention comprises a target-specific binding element otherwise referred to as an antigen binding domain. The choice of moiety depends upon the type and number of ligands that define the surface of a target cell. For example, the antigen binding domain may be chosen to recognize a ligand that acts as a cell surface marker on target cells associated with a particular disease state. Thus, examples of cell surface markers that may act as ligands for the antigen binding domain in a CAR of the invention include those associated with viral, bacterial and parasitic infections, autoimmune disease and cancer cells.

[0268] In one aspect, the CAR-mediated T-cell response can be directed to an antigen of interest by way of engineering an antigen binding domain that specifically binds a desired antigen into the CAR.

[0269] In one aspect, the portion of the CAR comprising the antigen binding domain comprises an antigen binding domain that targets a tumor antigen, e.g., a tumor antigen described herein.

[0270] The antigen binding domain can be any domain that binds to the antigen including but not limited to a monoclonal antibody, a polyclonal antibody, a recombinant antibody, a human antibody, a humanized antibody, and a functional fragment thereof, including but not limited to a single-domain antibody such as a heavy chain variable domain (VH), a light chain variable domain (VL) and a variable domain (VHH) of camelid derived nanobody, and to an alternative scaffold known in the art to function as antigen binding domain, such as a recombinant fibronectin domain, a T cell receptor (TCR), or a fragment there of, e.g., single chain TCR, and the like. In some instances, it is beneficial for the antigen binding domain to be derived from the same species in which the CAR will ultimately be used in. For example, for use in humans, it may be beneficial for the antigen binding domain of the CAR to comprise human or humanized residues for the antigen binding domain of an antibody or antibody fragment.

[0271] In one embodiment, the CD19 CAR is a CD19 CAR described in U.S. Pat. Nos. 8,399,645; 7,446,190; Xu et al., Leuk Lymphoma. 2013 54(2):255-260(2012); Cruz et al., Blood 122(17):2965-2973 (2013); Brentjens et al., Blood, 118(18):4817-4828 (2011); Kochenderfer et al., Blood 116(20):4099-102 (2010); Kochenderfer et al., Blood 122 (25):4129-39(2013); or 16th Annu Meet Am Soc Gen Cell Ther (ASGCT) (May 15-18, Salt Lake City) 2013, Abst 10 (each of which is herein incorporated by reference in their entirety). In one embodiment, an antigen binding domain against CD19 is an antigen binding portion, e.g., CDRs, of a CAR, antibody or antigen-binding fragment thereof described in, e.g., PCT publication WO2012/079000 (incorporated herein by reference in its entirety). In one embodiment, an antigen binding domain against CD19 is an antigen binding portion, e.g., CDRs, of a CAR, antibody or antigen-binding fragment thereof described in, e.g., PCT publication WO2014/153270; Kochenderfer, J. N. et al., J. Immunother. 32 (7), 689-702 (2009); Kochenderfer, J. N., et al., Blood, 116 (20), 4099-4102 (2010); PCT publication WO2014/031687; Bejcek, Cancer Research, 55, 2346-2351, 1995; or U.S. Pat. No. 7,446,190 (each of which is herein incorporated by reference in their entirety).

[0272] In one embodiment, the antigen binding domain against mesothelin is or may be derived from an antigen binding domain, e.g., CDRs, scFv, or VH and VL, of an antibody, antigen-binding fragment or CAR described in, e.g., PCT publication WO2015/090230 (In one embodiment the CAR is a CAR described in WO2015/090230, the contents of which are incorporated herein in their entirety). In embodiments, the antigen binding domain against mesothelin is or is derived from an antigen binding portion, e.g., CDRs, scFv, or VH and VL, of an antibody, antigen-binding fragment, or CAR described in, e.g., PCT publication WO1997/025068, WO1999/028471, WO2005/014652, WO2006/099141, WO2009/045957, WO2009/068204, WO2013/142034, WO2013/040557, or WO2013/063419 (each of which is herein incorporated by reference in their entirety).

[0273] In one embodiment, an antigen binding domain against CD123 is or is derived from an antigen binding portion, e.g., CDRs, scFv or VH and VL, of an antibody, antigen-binding fragment or CAR described in, e.g., PCT publication WO2014/130635 (incorporated herein by reference in its entirety). In one embodiment, an antigen binding domain against CD123 is or is derived from an antigen binding portion, e.g., CDRs, scFv or VH and VL, of an antibody, antigen-binding fragment or CAR described in, e.g., PCT publication WO2016/028896 (incorporated herein by reference in its entirety); in embodiments, the CAR is a CAR described in WO2016/028896. In one embodiment, an antigen binding domain against CD123 is or is derived from an antigen binding portion, e.g., CDRs, scFv, or VL and VH, of an antibody, antigen-binding fragment, or CAR described in, e.g., PCT publication WO1997/024373, WO2008/127735 (e.g., a CD123 binding domain of 26292, 32701, 37716 or 32703), WO2014/138805 (e.g., a CD123 binding domain of CSL362), WO2014/138819, WO2013/173820, WO2014/144622, WO2001/66139, WO2010/126066 (e.g., the CD123 binding domain of any of Old4, Old5, Old17, Old19, New102, or Old6), WO2014/144622, or US2009/0252742 (each of which is incorporated herein by reference in its entirety).

[0274] In one embodiment, an antigen binding domain against CD22 is an antigen binding portion, e.g., CDRs, of an antibody described in, e.g., Haso et al., Blood, 121(7): 1165-1174 (2013); Wayne et al., Clin Cancer Res 16(6): 1894-1903 (2010); Kato et al., Leuk Res 37(1):83-88 (2013); Creative BioMart (creativebiomart.net): MOM-18047-S(P).

[0275] In one embodiment, an antigen binding domain against CS-1 is an antigen binding portion, e.g., CDRs, of Elotuzumab (BMS), see e.g., Tai et al., 2008, Blood 112(4):1329-37; Tai et al., 2007, Blood. 110(5):1656-63.

[0276] In one embodiment, an antigen binding domain against CLL-1 is an antigen binding portion, e.g., CDRs or VH and VL, of an antibody, antigen-binding fragment or CAR described in, e.g., PCT publication WO2016/014535, the contents of which are incorporated herein in their entirety. In one embodiment, an antigen binding domain against CLL-1 is an antigen binding portion, e.g., CDRs, of an antibody available from R&D, ebiosciences, Abcam, for example, PE-CLL1-hu Cat #353604 (BioLegend); and PE-CLL1 (CLEC12A) Cat #562566 (BD).

[0277] In one embodiment, an antigen binding domain against CD33 is an antigen binding portion, e.g., CDRs, of an antibody described in, e.g., Bross et al., Clin Cancer Res 7(6):1490-1496 (2001) (Gemtuzumab Ozogamicin, hP67.6), Caron et al., Cancer Res 52(24):6761-6767 (1992) (Lintuzumab, HuM195), Lapusan et al., Invest New Drugs 30(3):1121-1131 (2012) (AVE9633), Aigner et al., Leukemia 27(5): 1107-1115 (2013) (AMG330, CD33 BiTE), Dutour et al., Adv hematol 2012:683065 (2012), and Pizzitola et al., Leukemia doi:10.1038/Lue.2014.62 (2014). Exemplary CAR molecules that target CD33 are described herein, and are provided in WO2016/014576, e.g., in Table 2 of WO2016/014576 (incorporated by reference in its entirety).

[0278] In one embodiment, an antigen binding domain against GD2 is an antigen binding portion, e.g., CDRs, of an antibody described in, e.g., Mujoo et al., Cancer Res. 47(4):1098-1104 (1987); Cheung et al., Cancer Res 45(6):2642-2649 (1985), Cheung et al., J Clin Oncol 5(9):1430-1440 (1987), Cheung et al., J Clin Oncol 16(9):3053-3060 (1998), Handgretinger et al., Cancer Immunol Immunother 35(3):199-204 (1992). In some embodiments, an antigen binding domain against GD2 is an antigen binding portion of an antibody selected from mAb 14.18, 14G2a, ch14.18, hu14.18, 3F8, hu3F8, 3G6, 8B6, 60C3, 10B8, ME36.1, and 8H9, see e.g., WO2012033885, WO2013040371, WO2013192294, WO2013061273, WO2013123061, WO2013074916, and WO201385552. In some embodiments, an antigen binding domain against GD2 is an antigen binding portion of an antibody described in US Publication No.: 20100150910 or PCT Publication No.: WO 2011160119.

[0279] In one embodiment, an antigen binding domain against BCMA is an antigen binding portion, e.g., CDRs, of an antibody described in, e.g., WO2012163805, WO200112812, and WO2003062401. In embodiments, additional exemplary BCMA CAR constructs are generated using an antigen binding domain, e.g., CDRs, scFv, or VH and VL sequences from PCT Publication WO2012/0163805 (the contents of which are hereby incorporated by reference in its entirety). In embodiments, additional exemplary BCMA CAR constructs are generated using an antigen binding domain, e.g., CDRs, scFv, or VH and VL sequences from PCT Publication WO2016/014565 (the contents of which are hereby incorporated by reference in its entirety). In embodiments, additional exemplary BCMA CAR constructs are generated using an antigen binding domain, e.g., CDRs, scFv, or VH and VL sequences from PCT Publication WO2014/122144 (the contents of which are hereby incorporated by reference in its entirety). In embodiments, additional exemplary BCMA CAR constructs are generated using the CAR molecules, and/or the BCMA binding domains (e.g., CDRs, scFv, or VH and VL sequences) from PCT Publication WO2016/014789 (the contents of which are hereby incorporated by reference in its entirety). In embodiments, additional exemplary BCMA CAR constructs are generated using the CAR molecules, and/or the BCMA binding domains (e.g., CDRs, scFv, or VH and VL sequences) from PCT Publication WO2014/089335 (the contents of which are hereby incorporated by reference in its entirety). In embodiments, additional exemplary BCMA CAR constructs are generated using the CAR molecules, and/or the BCMA binding domains (e.g., CDRs, scFv, or VH and VL sequences) from PCT Publication WO2014/140248 (the contents of which are hereby incorporated by reference in its entirety).

[0280] In one embodiment, an antigen binding domain against Tn antigen is an antigen binding portion, e.g., CDRs, of an antibody described in, e.g., US 2014/0178365, U.S. Pat. No. 8,440,798, Brooks et al., PNAS 107(22):10056-10061 (2010), and Stone et al., Oncolmmunology 1(6):863-873(2012).

[0281] In one embodiment, an antigen binding domain against PSMA is an antigen binding portion, e.g., CDRs, of an antibody described in, e.g., Parker et al., Protein Expr Purif 89(2):136-145 (2013), US 20110268656 (J591 ScFv); Frigerio et al, European J Cancer 49(9):2223-2232 (2013) (scFvD2B); WO 2006125481 (mAbs 3/A12, 3/E7 and 3/F11) and single chain antibody fragments (scFv A5 and D7).

[0282] In one embodiment, an antigen binding domain against ROR1 is an antigen binding portion, e.g., CDRs, of an antibody described in, e.g., Hudecek et al., Clin Cancer Res 19(12):3153-3164 (2013); WO 2011159847; and US20130101607.

[0283] In one embodiment, an antigen binding domain against FLT3 is an antigen binding portion, e.g., CDRs, of an antibody described in, e.g., WO2011076922, U.S. Pat. No. 5,777,084, EP0754230, US20090297529, and several commercial catalog antibodies (R&D, ebiosciences, Abcam).

[0284] In one embodiment, an antigen binding domain against TAG72 is an antigen binding portion, e.g., CDRs, of an antibody described in, e.g., Hombach et al., Gastroenterology 113(4):1163-1170 (1997); and Abcam ab691.

[0285] In one embodiment, an antigen binding domain against FAP is an antigen binding portion, e.g., CDRs, of an antibody described in, e.g., Ostermann et al., Clinical Cancer Research 14:4584-4592 (2008) (FAP5), US Pat. Publication No. 2009/0304718; sibrotuzumab (see e.g., Hofheinz et al., Oncology Research and Treatment 26(1), 2003); and Tran et al., J Exp Med 210(6):1125-1135 (2013).

[0286] In one embodiment, an antigen binding domain against CD38 is an antigen binding portion, e.g., CDRs, of daratumumab (see, e.g., Groen et al., Blood 116(21):1261-1262 (2010); MOR202 (see, e.g., U.S. Pat. No. 8,263,746); or antibodies described in U.S. Pat. No. 8,362,211.

[0287] In one embodiment, an antigen binding domain against CD44v6 is an antigen binding portion, e.g., CDRs, of an antibody described in, e.g., Casucci et al., Blood 122(20):3461-3472 (2013).

[0288] In one embodiment, an antigen binding domain against CEA is an antigen binding portion, e.g., CDRs, of an antibody described in, e.g., Chmielewski et al., Gastoenterology 143(4):1095-1107 (2012).

[0289] In one embodiment, an antigen binding domain against EPCAM is an antigen binding portion, e.g., CDRS, of an antibody selected from MT110, EpCAM-CD3 bispecific Ab (see, e.g., clinicaltrials.gov/ct2/show/NCT00635596); Edrecolomab; 3622W94; ING-1; and adecatumumab (MT201).

[0290] In one embodiment, an antigen binding domain against PRSS21 is an antigen binding portion, e.g., CDRs, of an antibody described in U.S. Pat. No. 8,080,650.

[0291] In one embodiment, an antigen binding domain against B7H3 is an antigen binding portion, e.g., CDRs, of an antibody MGA271 (Macrogenics).

[0292] In one embodiment, an antigen binding domain against KIT is an antigen binding portion, e.g., CDRs, of an antibody described in, e.g., U.S. Pat. No. 7,915,391, US20120288506, and several commercial catalog antibodies.

[0293] In one embodiment, an antigen binding domain against IL-13Ra2 is an antigen binding portion, e.g., CDRs, of an antibody described in, e.g., WO2008/146911, WO2004087758, several commercial catalog antibodies, and WO2004087758.

[0294] In one embodiment, an antigen binding domain against CD30 is an antigen binding portion, e.g., CDRs, of an antibody described in, e.g., U.S. Pat. No. 7,090,843 B1, and EP0805871.

[0295] In one embodiment, an antigen binding domain against GD3 is an antigen binding portion, e.g., CDRs, of an antibody described in, e.g., U.S. Pat. Nos. 7,253,263; 8,207,308; US 20120276046; EP1013761; WO2005035577; and U.S. Pat. No. 6,437,098.

[0296] In one embodiment, an antigen binding domain against CD171 is an antigen binding portion, e.g., CDRs, of an antibody described in, e.g., Hong et al., J Immunother 37(2):93-104 (2014).

[0297] In one embodiment, an antigen binding domain against IL-11Ra is an antigen binding portion, e.g., CDRs, of an antibody available from Abcam (cat #ab55262) or Novus Biologicals (cat #EPR5446). In another embodiment, an antigen binding domain again IL-11Ra is a peptide, see, e.g., Huang et al., Cancer Res 72(1):271-281 (2012).

[0298] In one embodiment, an antigen binding domain against PSCA is an antigen binding portion, e.g., CDRs, of an antibody described in, e.g., Morgenroth et al., Prostate 67(10):1121-1131 (2007) (scFv 7F5); Nejatollahi et al., J of Oncology 2013(2013), article ID 839831 (scFv C5-II); and US Pat Publication No. 20090311181.

[0299] In one embodiment, an antigen binding domain against VEGFR2 is an antigen binding portion, e.g., CDRs, of an antibody described in, e.g., Chinnasamy et al., J Clin Invest 120(11):3953-3968 (2010).

[0300] In one embodiment, an antigen binding domain against LewisY is an antigen binding portion, e.g., CDRs, of an antibody described in, e.g., Kelly et al., Cancer Biother Radiopharm 23(4):411-423 (2008) (hu3S193 Ab (scFvs)); Dolezal et al., Protein Engineering 16(1):47-56 (2003) (NC10 scFv).

[0301] In one embodiment, an antigen binding domain against CD24 is an antigen binding portion, e.g., CDRs, of an antibody described in, e.g., Maliar et al., Gastroenterology 143(5):1375-1384 (2012).

[0302] In one embodiment, an antigen binding domain against PDGFR-beta is an antigen binding portion, e.g., CDRs, of an antibody Abcam ab32570.

[0303] In one embodiment, an antigen binding domain against SSEA-4 is an antigen binding portion, e.g., CDRs, of antibody MC813 (Cell Signaling), or other commercially available antibodies.

[0304] In one embodiment, an antigen binding domain against CD20 is an antigen binding portion, e.g., CDRs, of the antibody Rituximab, Ofatumumab, Ocrelizumab, Veltuzumab, or GA101.

[0305] In one embodiment, an antigen binding domain against Folate receptor alpha is an antigen binding portion, e.g., CDRs, of the antibody IMGN853, or an antibody described in US20120009181; U.S. Pat. No. 4,851,332, LK26: U.S. Pat. No. 5,952,484.

[0306] In one embodiment, an antigen binding domain against ERBB2 (Her2/neu) is an antigen binding portion, e.g., CDRs, of the antibody trastuzumab, or pertuzumab.

[0307] In one embodiment, an antigen binding domain against MUC1 is an antigen binding portion, e.g., CDRs, of the antibody SAR566658.

[0308] In one embodiment, the antigen binding domain against EGFR is antigen binding portion, e.g., CDRs, of the antibody cetuximab, panitumumab, zalutumumab, nimotuzumab, or matuzumab. In one embodiment, the antigen binding domain against EGFRvIII is or may be derived from an antigen binding domain, e.g., CDRs, scFv, or VH and VL, of an antibody, antigen-binding fragment or CAR described in, e.g., PCT publication WO2014/130657 (In one embodiment the CAR is a CAR described in WO2014/130657, the contents of which are incorporated herein in their entirety).

[0309] In one embodiment, an antigen binding domain against NCAM is an antigen binding portion, e.g., CDRs, of the antibody clone 2-2B: MAB5324 (EMD Millipore)

[0310] In one embodiment, an antigen binding domain against Ephrin B2 is an antigen binding portion, e.g., CDRs, of an antibody described in, e.g., Abengozar et al., Blood 119(19):4565-4576 (2012).

[0311] In one embodiment, an antigen binding domain against IGF-I receptor is an antigen binding portion, e.g., CDRs, of an antibody described in, e.g., U.S. Pat. No. 8,344,112 B2; EP2322550 A1; WO 2006/138315, or PCT/US2006/022995.

[0312] In one embodiment, an antigen binding domain against CAIX is an antigen binding portion, e.g., CDRs, of the antibody clone 303123 (R&D Systems).

[0313] In one embodiment, an antigen binding domain against LMP2 is an antigen binding portion, e.g., CDRs, of an antibody described in, e.g., U.S. Pat. No. 7,410,640, or US20050129701.

[0314] In one embodiment, an antigen binding domain against gp100 is an antigen binding portion, e.g., CDRs, of the antibody HM41B45, NKIbetaB, or an antibody described in WO2013165940, or US20130295007 In one embodiment, an antigen binding domain against tyrosinase is an antigen binding portion, e.g., CDRs, of an antibody described in, e.g., U.S. Pat. No. 5,843,674; or U.S. Ser. No. 19/950,504048.

[0315] In one embodiment, an antigen binding domain against EphA2 is an antigen binding portion, e.g., CDRs, of an antibody described in, e.g., Yu et al., Mol Ther 22(1):102-111 (2014).

[0316] In one embodiment, an antigen binding domain against GD3 is an antigen binding portion, e.g., CDRs, of an antibody described in, e.g., U.S. Pat. Nos. 7,253,263; 8,207,308; US 20120276046; EP1013761 A3; 20120276046; WO2005035577; or U.S. Pat. No. 6,437,098.

[0317] In one embodiment, an antigen binding domain against fucosyl GM1 is an antigen binding portion, e.g., CDRs, of an antibody described in, e.g., US20100297138; or WO2007/067992.

[0318] In one embodiment, an antigen binding domain against sLe is an antigen binding portion, e.g., CDRs, of the antibody G193 (for lewis Y), see Scott A M et al, Cancer Res 60: 3254-61 (2000), also as described in Neeson et al, J Immunol May 2013 190 (Meeting Abstract Supplement) 177.10.

[0319] In one embodiment, an antigen binding domain against GM3 is an antigen binding portion, e.g., CDRs, of the antibody CA 2523449 (mAb 14F7).

[0320] In one embodiment, an antigen binding domain against HMWMAA is an antigen binding portion, e.g., CDRs, of an antibody described in, e.g., Kmiecik et al., Oncoimmunology 3(1):e27185 (2014) (PMID: 24575382) (mAb9.2.27); U.S. Pat. No. 6,528,481; WO2010033866; or US 20140004124.

[0321] In one embodiment, an antigen binding domain against o-acetyl-GD2 is an antigen binding portion, e.g., CDRs, of the antibody 8B6.

[0322] In one embodiment, an antigen binding domain against TEM1/CD248 is an antigen binding portion, e.g., CDRs, of an antibody described in, e.g., Marty et al., Cancer Lett 235(2):298-308 (2006); Zhao et al., J Immunol Methods 363(2):221-232 (2011).

[0323] In one embodiment, an antigen binding domain against CLDN6 is an antigen binding portion, e.g., CDRs, of the antibody IMAB027 (Ganymed Pharmaceuticals), see e.g., clinicaltrial.gov/show/NCT02054351.

[0324] In one embodiment, an antigen binding domain against TSHR is an antigen binding portion, e.g., CDRs, of an antibody described in, e.g., U.S. Pat. Nos. 8,603,466; 8,501,415; or U.S. Pat. No. 8,309,693.

[0325] In one embodiment, an antigen binding domain against GPRC5D is an antigen binding portion, e.g., CDRs, of the antibody FAB6300A (R&D Systems); or LS-A4180 (Lifespan Biosciences).

[0326] In one embodiment, an antigen binding domain against CD97 is an antigen binding portion, e.g., CDRs, of an antibody described in, e.g., U.S. Pat. No. 6,846,911; de Groot et al., J Immunol 183(6):4127-4134 (2009); or an antibody from R&D:MAB3734.

[0327] In one embodiment, an antigen binding domain against ALK is an antigen binding portion, e.g., CDRs, of an antibody described in, e.g., Mino-Kenudson et al., Clin Cancer Res 16(5):1561-1571 (2010).

[0328] In one embodiment, an antigen binding domain against polysialic acid is an antigen binding portion, e.g., CDRs, of an antibody described in, e.g., Nagae et al., J Biol Chem 288(47):33784-33796 (2013).

[0329] In one embodiment, an antigen binding domain against PLAC1 is an antigen binding portion, e.g., CDRs, of an antibody described in, e.g., Ghods et al., Biotechnol Appl Biochem 2013 doi:10.1002/bab.1177.

[0330] In one embodiment, an antigen binding domain against GloboH is an antigen binding portion of the antibody VK9; or an antibody described in, e.g., Kudryashov V et al, Glycoconj J.15(3):243-9 (1998), Lou et al., Proc Natl Acad Sci USA 111(7):2482-2487 (2014); MBr1: Bremer E-G et al. J Biol Chem 259:14773-14777 (1984).

[0331] In one embodiment, an antigen binding domain against NY-BR-1 is an antigen binding portion, e.g., CDRs of an antibody described in, e.g., Jager et al., Appl Immunohistochem Mol Morphol 15(1):77-83 (2007).

[0332] In one embodiment, an antigen binding domain against WT-1 is an antigen binding portion, e.g., CDRs, of an antibody described in, e.g., Dao et al., Sci Transl Med 5(176):176ra33 (2013); or WO2012/135854.

[0333] In one embodiment, an antigen binding domain against MAGE-A1 is an antigen binding portion, e.g., CDRs, of an antibody described in, e.g., Willemsen et al., J Immunol 174(12):7853-7858 (2005) (TCR-like scFv).

[0334] In one embodiment, an antigen binding domain against sperm protein 17 is an antigen binding portion, e.g., CDRs, of an antibody described in, e.g., Song et al., Target Oncol 2013 Aug. 14 (PMID: 23943313); Song et al., Med Oncol 29(4):2923-2931 (2012).

[0335] In one embodiment, an antigen binding domain against Tie 2 is an antigen binding portion, e.g., CDRs, of the antibody AB33 (Cell Signaling Technology).

[0336] In one embodiment, an antigen binding domain against MAD-CT-2 is an antigen binding portion, e.g., CDRs, of an antibody described in, e.g., PMID: 2450952; U.S. Pat. No. 7,635,753.

[0337] In one embodiment, an antigen binding domain against Fos-related antigen 1 is an antigen binding portion, e.g., CDRs, of the antibody 12F9 (Novus Biologicals).

[0338] In one embodiment, an antigen binding domain against MelanA/MART1 is an antigen binding portion, e.g., CDRs, of an antibody described in, EP2514766 A2; or U.S. Pat. No. 7,749,719.

[0339] In one embodiment, an antigen binding domain against sarcoma translocation breakpoints is an antigen binding portion, e.g., CDRs, of an antibody described in, e.g., Luo et al, EMBO Mol. Med. 4(6):453-461 (2012).

[0340] In one embodiment, an antigen binding domain against TRP-2 is an antigen binding portion, e.g., CDRs, of an antibody described in, e.g., Wang et al, J Exp Med. 184(6):2207-16 (1996).

[0341] In one embodiment, an antigen binding domain against CYP1B1 is an antigen binding portion, e.g., CDRs, of an antibody described in, e.g., Maecker et al, Blood 102 (9): 3287-3294 (2003).

[0342] In one embodiment, an antigen binding domain against RAGE-1 is an antigen binding portion, e.g., CDRs, of the antibody MAB5328 (EMD Millipore).

[0343] In one embodiment, an antigen binding domain against human telomerase reverse transcriptase is an antigen binding portion, e.g., CDRs, of the antibody cat no: LS-B95-100 (Lifespan Biosciences)

[0344] In one embodiment, an antigen binding domain against intestinal carboxyl esterase is an antigen binding portion, e.g., CDRs, of the antibody 4F12: cat no: LS-B6190-50 (Lifespan Biosciences).

[0345] In one embodiment, an antigen binding domain against mut hsp70-2 is an antigen binding portion, e.g., CDRs, of the antibody Lifespan Biosciences: monoclonal: cat no: LS-C133261-100 (Lifespan Biosciences).

[0346] In one embodiment, an antigen binding domain against CD79a is an antigen binding portion, e.g., CDRs, of the antibody Anti-CD79a antibody [HM47/A9] (ab3121), available from Abcam; antibody CD79A Antibody #3351 available from Cell Signalling Technology; or antibody HPA017748-Anti-CD79A antibody produced in rabbit, available from Sigma Aldrich.

[0347] In one embodiment, an antigen binding domain against CD79b is an antigen binding portion, e.g., CDRs, of the antibody polatuzumab vedotin, anti-CD79b described in Dornan et al., “Therapeutic potential of an anti-CD79b antibody-drug conjugate, anti-CD79b-vc-MMAE, for the treatment of non-Hodgkin lymphoma” Blood. 2009 Sep. 24; 114(13):2721-9. doi: 10.1182/blood-2009-02-205500. Epub 2009 Jul. 24, or the bispecific antibody Anti-CD79b/CD3 described in “4507 Pre-Clinical Characterization of T Cell-Dependent Bispecific Antibody Anti-CD79b/CD3 As a Potential Therapy for B Cell Malignancies” Abstracts of 56^{th} ASH Annual Meeting and Exposition, San Francisco, Calif. Dec. 6-9, 2014.

[0348] In one embodiment, an antigen binding domain against CD72 is an antigen binding portion, e.g., CDRs, of the antibody J3-109 described in Myers, and Uckun, “An anti-CD72 immunotoxin against therapy-refractory B-lineage acute lymphoblastic leukemia.” Leuk Lymphoma. 1995 Jun.; 18(1-2):119-22, or anti-CD72 (10D6.8.1, mIgG1) described in Polson et al., “Antibody-Drug Conjugates for the Treatment of Non-Hodgkin's Lymphoma: Target and Linker-Drug Selection” Cancer Res Mar. 15, 2009 69; 2358.

[0349] In one embodiment, an antigen binding domain against LAIR1 is an antigen binding portion, e.g., CDRs, of the antibody ANT-301 LAIR1 antibody, available from ProSpec; or anti-human CD305 (LAIR1) Antibody, available from BioLegend.

[0350] In one embodiment, an antigen binding domain against FCAR is an antigen binding portion, e.g., CDRs, of the antibody CD89/FCARAntibody (Catalog #10414-H08H), available from Sino Biological Inc.

[0351] In one embodiment, an antigen binding domain against LILRA2 is an antigen binding portion, e.g., CDRs, of the antibody LILRA2 monoclonal antibody (M17), clone 3C7, available from Abnova, or Mouse Anti-LILRA2 antibody, Monoclonal (2D7), available from Lifespan Biosciences.

[0352] In one embodiment, an antigen binding domain against CD300LF is an antigen binding portion, e.g., CDRs, of the antibody Mouse Anti-CMRF35-like molecule 1 antibody, Monoclonal[UP-D2], available from BioLegend, or Rat Anti-CMRF35-like molecule 1 antibody, Monoclonal[234903], available from R&D Systems.

[0353] In one embodiment, an antigen binding domain against CLEC12A is an antigen binding portion, e.g., CDRs, of the antibody Bispecific T cell Engager (BiTE) scFv-antibody and ADC described in Noordhuis et al., “Targeting of CLEC12A In Acute Myeloid Leukemia by Antibody-Drug-Conjugates and Bispecific CLL-1×CD3 BiTE Antibody” 53^{rd} ASH Annual Meeting and Exposition, Dec. 10-13, 2011, and MCLA-117 (Merus).

[0354] In one embodiment, an antigen binding domain against BST2 (also called CD317) is an antigen binding portion, e.g., CDRs, of the antibody Mouse Anti-CD317 antibody, Monoclonal[3H4], available from Antibodies-Online or Mouse Anti-CD317 antibody, Monoclonal[696739], available from R&D Systems.

[0355] In one embodiment, an antigen binding domain against EMR2 (also called CD312) is an antigen binding portion, e.g., CDRs, of the antibody Mouse Anti-CD312 antibody, Monoclonal[LS-B8033] available from Lifespan Biosciences, or Mouse Anti-CD312 antibody, Monoclonal[494025] available from R&D Systems.

[0356] In one embodiment, an antigen binding domain against LY75 is an antigen binding portion, e.g., CDRs, of the antibody Mouse Anti-Lymphocyte antigen 75 antibody, Monoclonal[HD30] available from EMD Millipore or Mouse Anti-Lymphocyte antigen 75 antibody, Monoclonal[A15797] available from Life Technologies.

[0357] In one embodiment, an antigen binding domain against GPC3 is an antigen binding portion, e.g., CDRs, of the antibody hGC33 described in Nakano K, Ishiguro T, Konishi H, et al. Generation of a humanized anti-glypican 3 antibody by CDR grafting and stability optimization. Anticancer Drugs. 2010 Nov.; 21(10):907-916, or MDX-1414, HN3, or YP7, all three of which are described in Feng et al., “Glypican-3 antibodies: a new therapeutic target for liver cancer.” FEBS Lett. 2014 Jan. 21; 588(2):377-82.

[0358] In one embodiment, an antigen binding domain against FCRL5 is an antigen binding portion, e.g., CDRs, of the anti-FcRL5 antibody described in Elkins et al., “FcRL5 as a target of antibody-drug conjugates for the treatment of multiple myeloma” Mol Cancer Ther. 2012 Oct.; 11(10):2222-32.

[0359] In one embodiment, an antigen binding domain against IGLL1 is an antigen binding portion, e.g., CDRs, of the antibody Mouse Anti-Immunoglobulin lambda-like polypeptide 1 antibody, Monoclonal[A T1G4] available from Lifespan Biosciences, Mouse Anti-Immunoglobulin lambda-like polypeptide 1 antibody, Monoclonal[HSL11] available from BioLegend.

[0360] In one embodiment, the antigen binding domain comprises one, two three (e.g., all three) heavy chain CDRs, HC CDR1, HC CDR2 and HC CDR3, from an antibody listed above, and/or one, two, three (e.g., all three) light chain CDRs, LC CDR1, LC CDR2 and LC CDR3, from an antibody listed above. In one embodiment, the antigen binding domain comprises a heavy chain variable region and/or a variable light chain region of an antibody listed above.

[0361] In another aspect, the antigen binding domain comprises a humanized antibody or an antibody fragment. In some aspects, a non-human antibody is humanized, where specific sequences or regions of the antibody are modified to increase similarity to an antibody naturally produced in a human or fragment thereof. In one aspect, the antigen binding domain is humanized.

[0362] A humanized antibody can be produced using a variety of techniques known in the art, including but not limited to, CDR-grafting (see, e.g., European Patent No. EP 239,400; International Publication No. WO 91/09967; and U.S. Pat. Nos. 5,225,539, 5,530,101, and 5,585,089, each of which is incorporated herein in its entirety by reference), veneering or resurfacing (see, e.g., European Patent Nos. EP 592,106 and EP 519,596; Padlan, 1991, Molecular Immunology, 28(4/5):489-498; Studnicka et al., 1994, Protein Engineering, 7(6):805-814; and Roguska et al., 1994, PNAS, 91:969-973, each of which is incorporated herein by its entirety by reference), chain shuffling (see, e.g., U.S. Pat. No. 5,565,332, which is incorporated herein in its entirety by reference), and techniques disclosed in, e.g., U.S. Patent Application Publication No. US2005/0042664, U.S. Patent Application Publication No. US2005/0048617, U.S. Pat. Nos. 6,407,213, 5,766,886, International Publication No. WO 9317105, Tan et al., J. Immunol., 169:1119-25 (2002), Caldas et al., Protein Eng., 13(5):353-60 (2000), Morea et al., Methods, 20(3):267-79 (2000), Baca et al., J. Biol. Chem., 272(16):10678-84 (1997), Roguska et al., Protein Eng., 9(10):895-904 (1996), Couto et al., Cancer Res., 55 (23 Supp):5973s-5977s (1995), Couto et al., Cancer Res., 55(8):1717-22 (1995), Sandhu J S, Gene, 150(2):409-10 (1994), and Pedersen et al., J. Mol. Biol., 235(3):959-73 (1994), each of which is incorporated herein in its entirety by reference. Often, framework residues in the framework regions will be substituted with the corresponding residue from the CDR donor antibody to alter, for example improve, antigen binding. These framework substitutions are identified by methods well-known in the art, e.g., by modeling of the interactions of the CDR and framework residues to identify framework residues important for antigen binding and sequence comparison to identify unusual framework residues at particular positions. (See, e.g., Queen et al., U.S. Pat. No. 5,585,089; and Riechmann et al., 1988, Nature, 332:323, which are incorporated herein by reference in their entireties.)

[0363] A humanized antibody or antibody fragment has one or more amino acid residues remaining in it from a source which is nonhuman. These nonhuman amino acid residues are often referred to as “import” residues, which are typically taken from an “import” variable domain. As provided herein, humanized antibodies or antibody fragments comprise one or more CDRs from nonhuman immunoglobulin molecules and framework regions wherein the amino acid residues comprising the framework are derived completely or mostly from human germline. Multiple techniques for humanization of antibodies or antibody fragments are well-known in the art and can essentially be performed following the method of Winter and co-workers (Jones et al., Nature, 321:522-525 (1986); Riechmann et al., Nature, 332:323-327 (1988); Verhoeyen et al., Science, 239:1534-1536 (1988)), by substituting rodent CDRs or CDR sequences for the corresponding sequences of a human antibody, i.e., CDR-grafting (EP 239,400; PCT Publication No. WO 91/09967; and U.S. Pat. Nos. 4,816,567; 6,331,415; 5,225,539; 5,530,101; 5,585,089; 6,548,640, the contents of which are incorporated herein by reference herein in their entirety). In such humanized antibodies and antibody fragments, substantially less than an intact human variable domain has been substituted by the corresponding sequence from a nonhuman species. Humanized antibodies are often human antibodies in which some CDR residues and possibly some framework (FR) residues are substituted by residues from analogous sites in rodent antibodies. Humanization of antibodies and antibody fragments can also be achieved by veneering or resurfacing (EP 592,106; EP 519,596; Padlan, 1991, Molecular Immunology, 28(4/5):489-498; Studnicka et al., Protein Engineering, 7(6):805-814 (1994); and Roguska et al., PNAS, 91:969-973 (1994)) or chain shuffling (U.S. Pat. No. 5,565,332), the contents of which are incorporated herein by reference herein in their entirety.

[0364] The choice of human variable domains, both light and heavy, to be used in making the humanized antibodies is to reduce antigenicity. According to the so-called “best-fit” method, the sequence of the variable domain of a rodent antibody is screened against the entire library of known human variable-domain sequences. The human sequence which is closest to that of the rodent is then accepted as the human framework (FR) for the humanized antibody (Sims et al., J. Immunol., 151:2296 (1993); Chothia et al., J. Mol. Biol., 196:901 (1987), the contents of which are incorporated herein by reference herein in their entirety). Another method uses a particular framework derived from the consensus sequence of all human antibodies of a particular subgroup of light or heavy chains. The same framework may be used for several different humanized antibodies (see, e.g., Nicholson et al. Mol. Immun. 34 (16-17): 1157-1165 (1997); Carter et al., Proc. Natl. Acad. Sci. USA, 89:4285 (1992); Presta et al., J. Immunol., 151:2623 (1993), the contents of which are incorporated herein by reference herein in their entirety). In some embodiments, the framework region, e.g., all four framework regions, of the heavy chain variable region are derived from a VH4_4-59 germline sequence. In one embodiment, the framework region can comprise, one, two, three, four or five modifications, e.g., substitutions, e.g., from the amino acid at the corresponding murine sequence. In one embodiment, the framework region, e.g., all four framework regions of the light chain variable region are derived from a VK3_1.25 germline sequence. In one embodiment, the framework region can comprise, one, two, three, four or five modifications, e.g., substitutions, e.g., from the amino acid at the corresponding murine sequence.

[0365] In some aspects, the portion of a CAR composition of the invention that comprises an antibody fragment is humanized with retention of high affinity for the target antigen and other favorable biological properties. According to one aspect of the invention, humanized antibodies and antibody fragments are prepared by a process of analysis of the parental sequences and various conceptual humanized products using three-dimensional models of the parental and humanized sequences. Three-dimensional immunoglobulin models are commonly available and are familiar to those skilled in the art. Computer programs are available which illustrate and display probable three-dimensional conformational structures of selected candidate immunoglobulin sequences. Inspection of these displays permits analysis of the likely role of the residues in the functioning of the candidate immunoglobulin sequence, e.g., the analysis of residues that influence the ability of the candidate immunoglobulin to bind the target antigen. In this way, FR residues can be selected and combined from the recipient and import sequences so that the desired antibody or antibody fragment characteristic, such as increased affinity for the target antigen, is achieved. In general, the CDR residues are directly and most substantially involved in influencing antigen binding.

[0366] A humanized antibody or antibody fragment may retain a similar antigenic specificity as the original antibody, e.g., in the present invention, the ability to bind human a cancer associated antigen as described herein. In some embodiments, a humanized antibody or antibody fragment may have improved affinity and/or specificity of binding to human a cancer associated antigen as described herein.

[0367] In one aspect, the antigen binding domain of the invention is characterized by particular functional features or properties of an antibody or antibody fragment. For example, in one aspect, the portion of a CAR composition of the invention that comprises an antigen binding domain specifically binds a tumor antigen as described herein.

[0368] In one aspect, the anti-cancer associated antigen as described herein binding domain is a fragment, e.g., a single chain variable fragment (scFv). In one aspect, the anti-cancer associated antigen as described herein binding domain is a Fv, a Fab, a (Fab′)2, or a bi-functional (e.g. bi-specific) hybrid antibody (e.g., Lanzavecchia et al., Eur. J. Immunol. 17, 105 (1987)). In one aspect, the antibodies and fragments thereof of the invention binds a cancer associated antigen as described herein protein with wild-type or enhanced affinity.

[0369] In some instances, scFvs can be prepared according to method known in the art (see, for example, Bird et al., (1988) Science 242:423-426 and Huston et al., (1988) Proc. Natl. Acad. Sci. USA 85:5879-5883). ScFv molecules can be produced by linking VH and VL regions together using flexible polypeptide linkers. The scFv molecules comprise a linker (e.g., a Ser-Gly linker) with an optimized length and/or amino acid composition. The linker length can greatly affect how the variable regions of a scFv fold and interact. In fact, if a short polypeptide linker is employed (e.g., between 5-10 amino acids) intrachain folding is prevented. Interchain folding is also required to bring the two variable regions together to form a functional epitope binding site. For examples of linker orientation and size see, e.g., Hollinger et al. 1993 Proc Natl Acad. Sci. U.S.A. 90:6444-6448, U.S. Patent Application Publication Nos. 2005/0100543, 2005/0175606, 2007/0014794, and PCT publication Nos. WO2006/020258 and WO2007/024715, is incorporated herein by reference.

[0370] An scFv can comprise a linker of at least 1, 2, 3, 4, 5, 6, 7, 8, 9, 10, 11, 12, 13, 14, 15, 16, 17, 18, 19, 20, 25, 30, 35, 40, 45, 50, or more amino acid residues between its VL and VH regions. The linker sequence may comprise any naturally occurring amino acid. In some embodiments, the linker sequence comprises amino acids glycine and serine. In another embodiment, the linker sequence comprises sets of glycine and serine repeats such as (Gly₄Ser)n, where n is a positive integer equal to or greater than 1 (SEQ ID NO:22). In one embodiment, the linker can be (Gly₄Ser)₄ (SEQ ID NO:29) or (Gly₄Ser)₃ (SEQ ID NO:30). Variation in the linker length may retain or enhance activity, giving rise to superior efficacy in activity studies.

[0371] In another aspect, the antigen binding domain is a T cell receptor (“TCR”), or a fragment thereof, for example, a single chain TCR (scTCR). Methods to make such TCRs are known in the art. See, e.g., Willemsen R A et al, Gene Therapy 7: 1369-1377 (2000); Zhang T et al, Cancer Gene Ther 11: 487-496 (2004); Aggen et al, Gene Ther. 19(4):365-74 (2012) (references are incorporated herein by its entirety). For example, scTCR can be engineered that contains the Vα and Vβ genes from a T cell clone linked by a linker (e.g., a flexible peptide). This approach is very useful to cancer associated target that itself is intracelluar, however, a fragment of such antigen (peptide) is presented on the surface of the cancer cells by MHC.

[0372] Bispecific CARs

[0373] In an embodiment a multispecific antibody molecule is a bispecific antibody molecule. A bispecific antibody has specificity for no more than two antigens. A bispecific antibody molecule is characterized by a first immunoglobulin variable domain sequence which has binding specificity for a first epitope and a second immunoglobulin variable domain sequence that has binding specificity for a second epitope. In an embodiment the first and second epitopes are on the same antigen, e.g., the same protein (or subunit of a multimeric protein). In an embodiment the first and second epitopes overlap. In an embodiment the first and second epitopes do not overlap. In an embodiment the first and second epitopes are on different antigens, e.g., different proteins (or different subunits of a multimeric protein). In an embodiment a bispecific antibody molecule comprises a heavy chain variable domain sequence and a light chain variable domain sequence which have binding specificity for a first epitope and a heavy chain variable domain sequence and a light chain variable domain sequence which have binding specificity for a second epitope. In an embodiment a bispecific antibody molecule comprises a half antibody having binding specificity for a first epitope and a half antibody having binding specificity for a second epitope. In an embodiment a bispecific antibody molecule comprises a half antibody, or fragment thereof, having binding specificity for a first epitope and a half antibody, or fragment thereof, having binding specificity for a second epitope. In an embodiment a bispecific antibody molecule comprises a scFv, or fragment thereof, have binding specificity for a first epitope and a scFv, or fragment thereof, have binding specificity for a second epitope.

[0374] In certain embodiments, the antibody molecule is a multi-specific (e.g., a bispecific or a trispecific) antibody molecule. Protocols for generating bispecific or heterodimeric antibody molecules are known in the art; including but not limited to, for example, the “knob in a hole” approach described in, e.g., U.S. Pat. No. 5,731,168; the electrostatic steering Fc pairing as described in, e.g., WO 09/089004, WO 06/106905 and WO 2010/129304; Strand Exchange Engineered Domains (SEED) heterodimer formation as described in, e.g., WO 07/110205; Fab arm exchange as described in, e.g., WO 08/119353, WO 2011/131746, and WO 2013/060867; double antibody conjugate, e.g., by antibody cross-linking to generate a bi-specific structure using a heterobifunctional reagent having an amine-reactive group and a sulfhydryl reactive group as described in, e.g., U.S. Pat. No. 4,433,059; bispecific antibody determinants generated by recombining half antibodies (heavy-light chain pairs or Fabs) from different antibodies through cycle of reduction and oxidation of disulfide bonds between the two heavy chains, as described in, e.g., U.S. Pat. No. 4,444,878; trifunctional antibodies, e.g., three Fab′ fragments cross-linked through sulfhydryl reactive groups, as described in, e.g., U.S. Pat. No. 5,273,743; biosynthetic binding proteins, e.g., pair of scFvs cross-linked through C-terminal tails preferably through disulfide or amine-reactive chemical cross-linking, as described in, e.g., U.S. Pat. No. 5,534,254; bifunctional antibodies, e.g., Fab fragments with different binding specificities dimerized through leucine zippers (e.g., c-fos and c-jun) that have replaced the constant domain, as described in, e.g., U.S. Pat. No. 5,582,996; bispecific and oligospecific mono- and oligovalent receptors, e.g., VH-CH1 regions of two antibodies (two Fab fragments) linked through a polypeptide spacer between the CH1 region of one antibody and the VH region of the other antibody typically with associated light chains, as described in, e.g., U.S. Pat. No. 5,591,828; bispecific DNA-antibody conjugates, e.g., crosslinking of antibodies or Fab fragments through a double stranded piece of DNA, as described in, e.g., U.S. Pat. No. 5,635,602; bispecific fusion proteins, e.g., an expression construct containing two scFvs with a hydrophilic helical peptide linker between them and a full constant region, as described in, e.g., U.S. Pat. No. 5,637,481; multivalent and multispecific binding proteins, e.g., dimer of polypeptides having first domain with binding region of Ig heavy chain variable region, and second domain with binding region of Ig light chain variable region, generally termed diabodies (higher order structures are also encompassed creating for bispecifc, trispecific, or tetraspecific molecules, as described in, e.g., U.S. Pat. No. 5,837,242; minibody constructs with linked VL and VH chains further connected with peptide spacers to an antibody hinge region and CH3 region, which can be dimerized to form bispecific/multivalent molecules, as described in, e.g., U.S. Pat. No. 5,837,821; VH and VL domains linked with a short peptide linker (e.g., 5 or 10 amino acids) or no linker at all in either orientation, which can form dimers to form bispecific diabodies; trimers and tetramers, as described in, e.g., U.S. Pat. No. 5,844,094; String of VH domains (or VL domains in family members) connected by peptide linkages with crosslinkable groups at the C-terminus further associated with VL domains to form a series of FVs (or scFvs), as described in, e.g., U.S. Pat. No. 5,864,019; and single chain binding polypeptides with both a VH and a VL domain linked through a peptide linker are combined into multivalent structures through non-covalent or chemical crosslinking to form, e.g., homobivalent, heterobivalent, trivalent, and tetravalent structures using both scFV or diabody type format, as described in, e.g., U.S. Pat. No. 5,869,620. Additional exemplary multispecific and bispecific molecules and methods of making the same are found, for example, in U.S. Pat. Nos. 5,910,573, 5,932,448, 5,959,083, 5,989,830, 6,005,079, 6,239,259, 6,294,353, 6,333,396, 6,476,198, 6,511,663, 6,670,453, 6,743,896, 6,809,185, 6,833,441, 7,129,330, 7,183,076, 7,521,056, 7,527,787, 7,534,866, 7,612,181, US2002004587A1, US2002076406A1, US2002103345A1, US2003207346A1, US2003211078A1, US2004219643A1, US2004220388A1, US2004242847A1, US2005003403A1, US2005004352A1, US2005069552A1, US2005079170A1, US2005100543A1, US2005136049A1, US2005136051A1, US2005163782A1, US2005266425A1, US2006083747A1, US2006120960A1, US2006204493A1, US2006263367A1, US2007004909A1, US2007087381A1, US2007128150A1, US2007141049A1, US2007154901A1, US2007274985A1, US2008050370A1, US2008069820A1, US2008152645A1, US2008171855A1, US2008241884A1, US2008254512A1, US2008260738A1, US2009130106A1, US2009148905A1, US2009155275A1, US2009162359A1, US2009162360A1, US2009175851A1, US2009175867A1, US2009232811A1, US2009234105A1, US2009263392A1, US2009274649A1, EP346087A2, WO0006605A2, WO02072635A2, WO04081051A1, WO06020258A2, WO2007044887A2, WO2007095338A2, WO2007137760A2, WO2008119353A1, WO2009021754A2, WO2009068630A1, WO9103493A1, WO9323537A1, WO9409131A1, WO9412625A2, WO9509917A1, WO9637621A2, WO9964460A1. The contents of the above-referenced applications are incorporated herein by reference in their entireties.

[0375] Within each antibody or antibody fragment (e.g., scFv) of a bispecific antibody molecule, the VH can be upstream or downstream of the VL. In some embodiments, the upstream antibody or antibody fragment (e.g., scFv) is arranged with its VH (VH₁) upstream of its VL (VL₁) and the downstream antibody or antibody fragment (e.g., scFv) is arranged with its VL (VL₂) upstream of its VH (VH₂), such that the overall bispecific antibody molecule has the arrangement VH₁-VL₁-VL₂-VH₂. In other embodiments, the upstream antibody or antibody fragment (e.g., scFv) is arranged with its VL (VL₁) upstream of its VH (VH₁) and the downstream antibody or antibody fragment (e.g., scFv) is arranged with its VH (VH₂) upstream of its VL (VL₂), such that the overall bispecific antibody molecule has the arrangement VL₁-VH₁-VH₂-VL₂. Optionally, a linker is disposed between the two antibodies or antibody fragments (e.g., scFvs), e.g., between VL₁ and VL₂ if the construct is arranged as VH₁-VL₁-VL₂-VH₂, or between VH₁ and VH₂ if the construct is arranged as VL₁-VH₁-VH₂-VL₂. The linker may be a linker as described herein, e.g., a (Gly4-Ser)n linker, wherein n is 1, 2, 3, 4, 5, or 6, preferably 4 (SEQ ID NO: 72). In general, the linker between the two scFvs should be long enough to avoid mispairing between the domains of the two scFvs. Optionally, a linker is disposed between the VL and VH of the first scFv. Optionally, a linker is disposed between the VL and VH of the second scFv. In constructs that have multiple linkers, any two or more of the linkers can be the same or different. Accordingly, in some embodiments, a bispecific CAR comprises VLs, VHs, and optionally one or more linkers in an arrangement as described herein.

[0376] Stability and Mutations

[0377] The stability of an antigen binding domain to a cancer associated antigen as described herein, e.g., scFv molecules (e.g., soluble scFv), can be evaluated in reference to the biophysical properties (e.g., thermal stability) of a conventional control scFv molecule or a full length antibody. In one embodiment, the humanized scFv has a thermal stability that is greater than about 0.1, about 0.25, about 0.5, about 0.75, about 1, about 1.25, about 1.5, about 1.75, about 2, about 2.5, about 3, about 3.5, about 4, about 4.5, about 5, about 5.5, about 6, about 6.5, about 7, about 7.5, about 8, about 8.5, about 9, about 9.5, about 10 degrees, about 11 degrees, about 12 degrees, about 13 degrees, about 14 degrees, or about 15 degrees Celsius than a control binding molecule (e.g. a conventional scFv molecule) in the described assays.

[0378] The improved thermal stability of the antigen binding domain to a cancer associated antigen described herein, e.g., scFv is subsequently conferred to the entire CAR construct, leading to improved therapeutic properties of the CAR construct. The thermal stability of the antigen binding domain of—a cancer associated antigen described herein, e.g., scFv, can be improved by at least about 2° C. or 3° C. as compared to a conventional antibody. In one embodiment, the antigen binding domain of—a cancer associated antigen described herein, e.g., scFv, has a 1° C. improved thermal stability as compared to a conventional antibody. In another embodiment, the antigen binding domain of a cancer associated antigen described herein, e.g., scFv, has a 2° C. improved thermal stability as compared to a conventional antibody. In another embodiment, the scFv has a 4, 5, 6, 7, 8, 9, 10, 11, 12, 13, 14, 15° C. improved thermal stability as compared to a conventional antibody. Comparisons can be made, for example, between the scFv molecules disclosed herein and scFv molecules or Fab fragments of an antibody from which the scFv VH and VL were derived. Thermal stability can be measured using methods known in the art. For example, in one embodiment, Tm can be measured. Methods for measuring Tm and other methods of determining protein stability are described in more detail below.

[0379] Mutations in scFv (arising through humanization or direct mutagenesis of the soluble scFv) can alter the stability of the scFv and improve the overall stability of the scFv and the CAR construct. Stability of the humanized scFv is compared against the murine scFv using measurements such as Tm, temperature denaturation and temperature aggregation.

[0380] The binding capacity of the mutant scFvs can be determined using assays know in the art and described herein.

[0381] In one embodiment, the antigen binding domain of—a cancer associated antigen described herein, e.g., scFv, comprises at least one mutation arising from the humanization process such that the mutated scFv confers improved stability to the CAR construct. In another embodiment, the antigen binding domain of—a cancer associated antigen described herein, e.g., scFv, comprises at least 1, 2, 3, 4, 5, 6, 7, 8, 9, 10 mutations arising from the humanization process such that the mutated scFv confers improved stability to the CAR construct.

[0382] Methods of Evaluating Protein Stability

[0383] The stability of an antigen binding domain may be assessed using, e.g., the methods described below. Such methods allow for the determination of multiple thermal unfolding transitions where the least stable domain either unfolds first or limits the overall stability threshold of a multidomain unit that unfolds cooperatively (e.g., a multidomain protein which exhibits a single unfolding transition). The least stable domain can be identified in a number of additional ways. Mutagenesis can be performed to probe which domain limits the overall stability. Additionally, protease resistance of a multidomain protein can be performed under conditions where the least stable domain is known to be intrinsically unfolded via DSC or other spectroscopic methods (Fontana, et al., (1997) Fold. Des., 2: R17-26; Dimasi et al. (2009) J. Mol. Biol. 393: 672-692). Once the least stable domain is identified, the sequence encoding this domain (or a portion thereof) may be employed as a test sequence in the methods.

[0384] a) Thermal Stability

[0385] The thermal stability of the compositions may be analyzed using a number of non-limiting biophysical or biochemical techniques known in the art. In certain embodiments, thermal stability is evaluated by analytical spectroscopy.

[0386] An exemplary analytical spectroscopy method is Differential Scanning Calorimetry (DSC). DSC employs a calorimeter which is sensitive to the heat absorbances that accompany the unfolding of most proteins or protein domains (see, e.g. Sanchez-Ruiz, et al., Biochemistry, 27: 1648-52, 1988). To determine the thermal stability of a protein, a sample of the protein is inserted into the calorimeter and the temperature is raised until the Fab or scFv unfolds. The temperature at which the protein unfolds is indicative of overall protein stability.

[0387] Another exemplary analytical spectroscopy method is Circular Dichroism (CD) spectroscopy. CD spectrometry measures the optical activity of a composition as a function of increasing temperature. Circular dichroism (CD) spectroscopy measures differences in the absorption of left-handed polarized light versus right-handed polarized light which arise due to structural asymmetry. A disordered or unfolded structure results in a CD spectrum very different from that of an ordered or folded structure. The CD spectrum reflects the sensitivity of the proteins to the denaturing effects of increasing temperature and is therefore indicative of a protein's thermal stability (see van Mierlo and Steemsma, J. Biotechnol., 79(3):281-98, 2000).

[0388] Another exemplary analytical spectroscopy method for measuring thermal stability is Fluorescence Emission Spectroscopy (see van Mierlo and Steemsma, supra). Yet another exemplary analytical spectroscopy method for measuring thermal stability is Nuclear Magnetic Resonance (NMR) spectroscopy (see, e.g. van Mierlo and Steemsma, supra).

[0389] The thermal stability of a composition can be measured biochemically. An exemplary biochemical method for assessing thermal stability is a thermal challenge assay. In a “thermal challenge assay”, a composition is subjected to a range of elevated temperatures for a set period of time. For example, in one embodiment, test scFv molecules or molecules comprising scFv molecules are subject to a range of increasing temperatures, e.g., for 1-1.5 hours. The activity of the protein is then assayed by a relevant biochemical assay. For example, if the protein is a binding protein (e.g. an scFv or scFv-containing polypeptide) the binding activity of the binding protein may be determined by a functional or quantitative ELISA.

[0390] Such an assay may be done in a high-throughput format and those disclosed in the Examples using E. coli and high throughput screening. A library of antigen binding domains, e.g., that includes an antigen binding domain to—a cancer associated antigen described herein, e.g., scFv variants, may be created using methods known in the art. Antigen binding domain, e.g., to—a cancer associated antigen described herein, e.g., scFv, expression may be induced and the antigen binding domain, e.g., to—a cancer associated antigen described herein, e.g., scFv, may be subjected to thermal challenge. The challenged test samples may be assayed for binding and those antigen binding domains to—a cancer associated antigen described herein, e.g., scFvs, which are stable may be scaled up and further characterized.

[0391] Thermal stability is evaluated by measuring the melting temperature (Tm) of a composition using any of the above techniques (e.g. analytical spectroscopy techniques). The melting temperature is the temperature at the midpoint of a thermal transition curve wherein 50% of molecules of a composition are in a folded state (See e.g., Dimasi et al. (2009) J. Mol Biol. 393: 672-692). In one embodiment, Tm values for an antigen binding domain to—a cancer associated antigen described herein, e.g., scFv, are about 40° C., 41° C., 42° C., 43° C., 44° C., 45° C., 46° C., 47° C., 48° C., 49° C., 50° C., 51° C., 52° C., 53° C., 54° C., 55° C., 56° C., 57° C., 58° C., 59° C., 60° C., 61° C., 62° C., 63° C., 64° C., 65° C., 66° C., 67° C., 68° C., 69° C., 70° C., 71° C., 72° C., 73° C., 74° C., 75° C., 76° C., 77° C., 78° C., 79° C., 80° C., 81° C., 82° C., 83° C., 84° C., 85° C., 86° C., 87° C., 88° C., 89° C., 90° C., 91° C., 92° C., 93° C., 94° C., 95° C., 96° C., 97° C., 98° C., 99° C., 100° C. In one embodiment, Tm values for an IgG is about 40° C., 41° C., 42° C., 43° C., 44° C., 45° C., 46° C., 47° C., 48° C., 49° C., 50° C., 51° C., 52° C., 53° C., 54° C., 55° C., 56° C., 57° C., 58° C., 59° C., 60° C., 61° C., 62° C., 63° C., 64° C., 65° C., 66° C., 67° C., 68° C., 69° C., 70° C., 71° C., 72° C., 73° C., 74° C., 75° C., 76° C., 77° C., 78° C., 79° C., 80° C., 81° C., 82° C., 83° C., 84° C., 85° C., 86° C., 87° C., 88° C., 89° C., 90° C., 91° C., 92° C., 93° C., 94° C., 95° C., 96° C., 97° C., 98° C., 99° C., 100° C. In one embodiment, Tm values for an multivalent antibody is about 40° C., 41° C., 42° C., 43° C., 44° C., 45° C., 46° C., 47° C., 48° C., 49° C., 50° C., 51° C., 52° C., 53° C., 54° C., 55° C., 56° C., 57° C., 58° C., 59° C., 60° C., 61° C., 62° C., 63° C., 64° C., 65° C., 66° C., 67° C., 68° C., 69° C., 70° C., 71° C., 72° C., 73° C., 74° C., 75° C., 76° C., 77° C., 78° C., 79° C., 80° C., 81° C., 82° C., 83° C., 84° C., 85° C., 86° C., 87° C., 88° C., 89° C., 90° C., 91° C., 92° C., 93° C., 94° C., 95° C., 96° C., 97° C., 98° C., 99° C., 100° C.

[0392] Thermal stability is also evaluated by measuring the specific heat or heat capacity (Cp) of a composition using an analytical calorimetric technique (e.g. DSC). The specific heat of a composition is the energy (e.g. in kcal/mol) is required to rise by 1° C., the temperature of 1 mol of water. As large Cp is a hallmark of a denatured or inactive protein composition. The change in heat capacity (ΔCp) of a composition is measured by determining the specific heat of a composition before and after its thermal transition. Thermal stability may also be evaluated by measuring or determining other parameters of thermodynamic stability including Gibbs free energy of unfolding (ΔG), enthalpy of unfolding (ΔH), or entropy of unfolding (ΔS). One or more of the above biochemical assays (e.g. a thermal challenge assay) are used to determine the temperature (i.e. the Tc value) at which 50% of the composition retains its activity (e.g. binding activity).

[0393] In addition, mutations to the antigen binding domain of a cancer associated antigen described herein, e.g., scFv, can be made to alter the thermal stability of the antigen binding domain of a cancer associated antigen described herein, e.g., scFv, as compared with the unmutated antigen binding domain of a cancer associated antigen described herein, e.g., scFv. When the humanized antigen binding domain of a cancer associated antigen described herein, e.g., scFv, is incorporated into a CAR construct, the antigen binding domain of the cancer associated antigen described herein, e.g., humanized scFv, confers thermal stability to the overall CARs of the present invention. In one embodiment, the antigen binding domain to a cancer associated antigen described herein, e.g., scFv, comprises a single mutation that confers thermal stability to the antigen binding domain of the cancer associated antigen described herein, e.g., scFv. In another embodiment, the antigen binding domain to a cancer associated antigen described herein, e.g., scFv, comprises multiple mutations that confer thermal stability to the antigen binding domain to the cancer associated antigen described herein, e.g., scFv. In one embodiment, the multiple mutations in the antigen binding domain to a cancer associated antigen described herein, e.g., scFv, have an additive effect on thermal stability of the antigen binding domain to the cancer associated antigen described herein binding domain, e.g., scFv.

[0394] b) % Aggregation

[0395] The stability of a composition can be determined by measuring its propensity to aggregate. Aggregation can be measured by a number of non-limiting biochemical or biophysical techniques. For example, the aggregation of a composition may be evaluated using chromatography, e.g. Size-Exclusion Chromatography (SEC). SEC separates molecules on the basis of size. A column is filled with semi-solid beads of a polymeric gel that will admit ions and small molecules into their interior but not large ones. When a protein composition is applied to the top of the column, the compact folded proteins (i.e. non-aggregated proteins) are distributed through a larger volume of solvent than is available to the large protein aggregates. Consequently, the large aggregates move more rapidly through the column, and in this way the mixture can be separated or fractionated into its components. Each fraction can be separately quantified (e.g. by light scattering) as it elutes from the gel. Accordingly, the % aggregation of a composition can be determined by comparing the concentration of a fraction with the total concentration of protein applied to the gel. Stable compositions elute from the column as essentially a single fraction and appear as essentially a single peak in the elution profile or chromatogram.

[0396] c) Binding Affinity

[0397] The stability of a composition can be assessed by determining its target binding affinity. A wide variety of methods for determining binding affinity are known in the art. An exemplary method for determining binding affinity employs surface plasmon resonance. Surface plasmon resonance is an optical phenomenon that allows for the analysis of real-time biospecific interactions by detection of alterations in protein concentrations within a biosensor matrix, for example using the BIAcore system (Pharmacia Biosensor AB, Uppsala, Sweden and Piscataway, N.J.). For further descriptions, see Jonsson, U., et al. (1993) Ann. Biol. Clin. 51:19-26; Jonsson, U., i (1991) Biotechniques 11:620-627; Johnsson, B., et al. (1995) J. Mol. Recognit. 8:125-131; and Johnnson, B., et al. (1991) Anal. Biochem. 198:268-277.

[0398] In one aspect, the antigen binding domain of the CAR comprises an amino acid sequence that is homologous to an antigen binding domain amino acid sequence described herein, and the antigen binding domain retains the desired functional properties of the antigen binding domain described herein.

[0399] In one specific aspect, the CAR composition of the invention comprises an antibody fragment. In a further aspect, the antibody fragment comprises an scFv.

[0400] In various aspects, the antigen binding domain of the CAR is engineered by modifying one or more amino acids within one or both variable regions (e.g., VH and/or VL), for example within one or more CDR regions and/or within one or more framework regions. In one specific aspect, the CAR composition of the invention comprises an antibody fragment. In a further aspect, the antibody fragment comprises an scFv.

[0401] It will be understood by one of ordinary skill in the art that the antibody or antibody fragment of the invention may further be modified such that they vary in amino acid sequence (e.g., from wild-type), but not in desired activity. For example, additional nucleotide substitutions leading to amino acid substitutions at “non-essential” amino acid residues may be made to the protein For example, a nonessential amino acid residue in a molecule may be replaced with another amino acid residue from the same side chain family. In another embodiment, a string of amino acids can be replaced with a structurally similar string that differs in order and/or composition of side chain family members, e.g., a conservative substitution, in which an amino acid residue is replaced with an amino acid residue having a similar side chain, may be made.

[0402] Families of amino acid residues having similar side chains have been defined in the art, including basic side chains (e.g., lysine, arginine, histidine), acidic side chains (e.g., aspartic acid, glutamic acid), uncharged polar side chains (e.g., glycine, asparagine, glutamine, serine, threonine, tyrosine, cysteine), nonpolar side chains (e.g., alanine, valine, leucine, isoleucine, proline, phenylalanine, methionine, tryptophan), beta-branched side chains (e.g., threonine, valine, isoleucine) and aromatic side chains (e.g., tyrosine, phenylalanine, tryptophan, histidine).

[0403] Percent identity in the context of two or more nucleic acids or polypeptide sequences, refers to two or more sequences that are the same. Two sequences are “substantially identical” if two sequences have a specified percentage of amino acid residues or nucleotides that are the same (e.g., 60% identity, optionally 70%, 71%. 72%. 73%, 74%, 75%, 76%, 77%, 78%, 79%, 80%, 81%, 82%, 83%, 84%, 85%, 86%, 87%, 88%, 89%, 90%, 91%, 92%, 93%, 94%, 95%, 96%, 97%, 98%, 99% identity over a specified region, or, when not specified, over the entire sequence), when compared and aligned for maximum correspondence over a comparison window, or designated region as measured using one of the following sequence comparison algorithms or by manual alignment and visual inspection. Optionally, the identity exists over a region that is at least about 50 nucleotides (or 10 amino acids) in length, or more preferably over a region that is 100 to 500 or 1000 or more nucleotides (or 20, 50, 200 or more amino acids) in length.

[0404] For sequence comparison, typically one sequence acts as a reference sequence, to which test sequences are compared. When using a sequence comparison algorithm, test and reference sequences are entered into a computer, subsequence coordinates are designated, if necessary, and sequence algorithm program parameters are designated. Default program parameters can be used, or alternative parameters can be designated. The sequence comparison algorithm then calculates the percent sequence identities for the test sequences relative to the reference sequence, based on the program parameters. Methods of alignment of sequences for comparison are well known in the art. Optimal alignment of sequences for comparison can be conducted, e.g., by the local homology algorithm of Smith and Waterman, (1970) Adv. Appl. Math. 2:482c, by the homology alignment algorithm of Needleman and Wunsch, (1970) J. Mol. Biol. 48:443, by the search for similarity method of Pearson and Lipman, (1988) Proc. Nat′l. Acad. Sci. USA 85:2444, by computerized implementations of these algorithms (GAP, BESTFIT, FASTA, and TFASTA in the Wisconsin Genetics Software Package, Genetics Computer Group, 575 Science Dr., Madison, Wis.), or by manual alignment and visual inspection (see, e.g., Brent et al., (2003) Current Protocols in Molecular Biology).

[0405] Two examples of algorithms that are suitable for determining percent sequence identity and sequence similarity are the BLAST and BLAST 2.0 algorithms, which are described in Altschul et al., (1977) Nuc. Acids Res. 25:3389-3402; and Altschul et al., (1990) J. Mol. Biol. 215:403-410, respectively. Software for performing BLAST analyses is publicly available through the National Center for Biotechnology Information.

[0406] The percent identity between two amino acid sequences can also be determined using the algorithm of E. Meyers and W. Miller, (1988) Comput. Appl. Biosci. 4:11-17) which has been incorporated into the ALIGN program (version 2.0), using a PAM120 weight residue table, a gap length penalty of 12 and a gap penalty of 4. In addition, the percent identity between two amino acid sequences can be determined using the Needleman and Wunsch (1970) J. Mol. Biol. 48:444-453) algorithm which has been incorporated into the GAP program in the GCG software package (available at www.gcg.com), using either a Blossom 62 matrix or a PAM250 matrix, and a gap weight of 16, 14, 12, 10, 8, 6, or 4 and a length weight of 1, 2, 3, 4, 5, or 6.

[0407] In one aspect, the present invention contemplates modifications of the starting antibody or fragment (e.g., scFv) amino acid sequence that generate functionally equivalent molecules. For example, the VH or VL of an antigen binding domain to—a cancer associated antigen described herein, e.g., scFv, comprised in the CAR can be modified to retain at least about 70%, 71%. 72%. 73%, 74%, 75%, 76%, 77%, 78%, 79%, 80%, 81%, 82%, 83%, 84%, 85%, 86%, 87%, 88%, 89%, 90%, 91%, 92%, 93%, 94%, 95%, 96%, 97%, 98%, 99% identity of the starting VH or VL framework region of the antigen binding domain to the cancer associated antigen described herein, e.g., scFv. The present invention contemplates modifications of the entire CAR construct, e.g., modifications in one or more amino acid sequences of the various domains of the CAR construct in order to generate functionally equivalent molecules. The CAR construct can be modified to retain at least about 70%, 71%. 72%. 73%, 74%, 75%, 76%, 77%, 78%, 79%, 80%, 81%, 82%, 83%, 84%, 85%, 86%, 87%, 88%, 89%0, 90%, 91%, 92%, 93%, 94%, 95%, 96%, 97%, 98%, 99% identity of the starting CAR construct.

[0408] Transmembrane Domain

[0409] With respect to the transmembrane domain, in various embodiments, a CAR can be designed to comprise a transmembrane domain that is attached to the extracellular domain of the CAR. A transmembrane domain can include one or more additional amino acids adjacent to the transmembrane region, e.g., one or more amino acid associated with the extracellular region of the protein from which the transmembrane was derived (e.g., 1, 2, 3, 4, 5, 6, 7, 8, 9, 10 up to 15 amino acids of the extracellular region) and/or one or more additional amino acids associated with the intracellular region of the protein from which the transmembrane protein is derived (e.g., 1, 2, 3, 4, 5, 6, 7, 8, 9, 10 up to 15 amino acids of the intracellular region). In one aspect, the transmembrane domain is one that is associated with one of the other domains of the CAR e.g., in one embodiment, the transmembrane domain may be from the same protein that the signaling domain, costimulatory domain or the hinge domain is derived from. In another aspect, the transmembrane domain is not derived from the same protein that any other domain of the CAR is derived from. In some instances, the transmembrane domain can be selected or modified by amino acid substitution to avoid binding of such domains to the transmembrane domains of the same or different surface membrane proteins, e.g., to minimize interactions with other members of the receptor complex. In one aspect, the transmembrane domain is capable of homodimerization with another CAR on the cell surface of a CAR-expressing cell. In a different aspect, the amino acid sequence of the transmembrane domain may be modified or substituted so as to minimize interactions with the binding domains of the native binding partner present in the same CAR-expressing cell.

[0410] The transmembrane domain may be derived either from a natural or from a recombinant source. Where the source is natural, the domain may be derived from any membrane-bound or transmembrane protein. In one aspect the transmembrane domain is capable of signaling to the intracellular domain(s) whenever the CAR has bound to a target. A transmembrane domain of particular use in this invention may include at least the transmembrane region(s) of e.g., the alpha, beta or zeta chain of the T-cell receptor, CD28, CD27, CD3 epsilon, CD45, CD4, CD5, CD8, CD9, CD16, CD22, CD33, CD37, CD64, CD80, CD86, CD134, CD137, CD154. In some embodiments, a transmembrane domain may include at least the transmembrane region(s) of, e.g., KIRDS2, OX40, CD2, CD27, LFA-1 (CD11a, CD18), ICOS (CD278), 4-1BB (CD137), GITR, CD40, BAFFR, HVEM (LIGHTR), SLAMF7, NKp80 (KLRF1), NKp44, NKp30, NKp46, CD160, CD19, IL2R beta, IL2R gamma, IL7R a, ITGA1, VLA1, CD49a, ITGA4, IA4, CD49D, ITGA6, VLA-6, CD49f, ITGAD, CD11 d, ITGAE, CD103, ITGAL, CD11a, LFA-1, ITGAM, CD11b, ITGAX, CD11c, ITGB1, CD29, ITGB2, CD18, LFA-1, ITGB7, TNFR2, DNAM1 (CD226), SLAMF4 (CD244, 2B4), CD84, CD96 (Tactile), CEACAM1, CRTAM, Ly9 (CD229), CD160 (BY55), PSGL1, CD100 (SEMA4D), SLAMF6 (NTB-A, Ly108), SLAM (SLAMF1, CD150, IPO-3), BLAME (SLAMF8), SELPLG (CD162), LTBR, PAG/Cbp, NKG2D, NKG2C.

[0411] In some instances, the transmembrane domain can be attached to the extracellular region of the CAR, e.g., the antigen binding domain of the CAR, via a hinge, e.g., a hinge from a human protein. For example, in one embodiment, the hinge can be a human Ig (immunoglobulin) hinge (e.g., an IgG4 hinge, an IgD hinge), a GS linker (e.g., a GS linker described herein), a KIR2DS2 hinge or a CD8a hinge. In one embodiment, the hinge or spacer comprises (e.g., consists of) the amino acid sequence of SEQ ID NO:4. In one aspect, the transmembrane domain comprises (e.g., consists of) a transmembrane domain of SEQ ID NO: 12.

[0412] In one aspect, the hinge or spacer comprises an IgG4 hinge. For example, in one embodiment, the hinge or spacer comprises a hinge of the amino acid sequence

(SEQ ID NO: 6)
ESKYGPPCPPCPAPEFLGGPSVFLFPPKPKDTLMI
SRTPEVTCVVVDVSQEDPEVQFNWYVDGVEVHNAK
TKPREEQFNSTYRVVSVLTVLHQDWLNGKEYKCKV
SNKGLPSSIEKTISKAKGQPREPQVYTLPPSQEEM
TKNQVSLTCLVKGFYPSDIAVEWESNGQPENNYKT
TPPVLDSDGSFFLYSRLTVDKSRWQEGNVFSCSVM
HEALHNHYTQKSLSLSLGKM.

In some embodiments, the hinge or spacer comprises a hinge encoded by a nucleotide sequence of

(SEQ ID NO: 7)
GAGAGCAAGTACGGCCCTCCCTGCCCCCCTTGCCCTGCCCCCGAGTTCCT
GGGCGGACCCAGCGTGTTCCTGTTCCCCCCCAAGCCCAAGGAGACCCTGA
TGATCAGCCGGACCCCCGAGGTGACCTGTGTGGTGGTGGACGTGTCCCAG
GAGGACCCCGAGGTCCAGTTCAACTGGTACGTGGACGGCGTGGAGGTGCA
CAACGCCAAGACCAAGCCCCGGGAGGAGCAGTTCAATAGCACCTACCGGG
TGGTGTCCGTGCTGACCGTGCTGCACCAGGACTGGCTGAACGGCAAGGAA
TACAAGTGTAAGGTGTCCAACAAGGGCCTGCCCAGCAGCATCGAGAAAAC
CATCAGCAAGGCCAAGGGCCAGCCTCGGGAGCCCCAGGTGTACACCCTGC
CCCCTAGCCAAGAGGAGATGACCAAGAACCAGGTGTCCCTGACCTGCCTG
GTGAAGGGCTTCTACCCCAGCGACATCGCCGTGGAGTGGGAGAGCAACGG
CCAGCCCGAGAACAACTACAAGACCACCCCCCCTGTGCTGGACAGCGACG
GCAGCTTCTTCCTGTACAGCCGGCTGACCGTGGACAAGAGCCGGTGGCAG
GAGGGCAACGTCTTTAGCTGCTCCGTGATGCACGAGGCCCTGCACAACCA
CTACACCCAGAAGAGCCTGAGCCTGTCCCTGGGCAAGATG.

[0413] In one aspect, the hinge or spacer comprises an IgD hinge. For example, in one embodiment, the hinge or spacer comprises a hinge of the amino acid sequence

(SEQ ID NO: 8)
RWPESPKAQASSVPTAQPQAEGSLAKATTAPATTR
NTGRGGEEKKKEKEKEEQEERETKTPECPSHTQPL
GVYLLTPAVQDLWLRDKATFTCFVVGSDLKDAHLT
WEVAGKVPTGGVEEGLLERHSNGSQSQHSRLTLPR
SLWNAGTSVTCTLNHPSLPPQRLMALREPAAQAPV
KLSLNLLASSDPPEAASWLLCEVSGFSPPNILLMW
LEDQREVNTSGFAPARPPPQPGSTTFWAWSVLRVP
APPSPQPATYTCVVSHEDSRTLLNASRSLEVSYVT
DH

In some embodiments, the hinge or spacer comprises a hinge encoded by a nucleotide sequence of

(SEQ ID NO: 9)
AGGTGGCCCGAAAGTCCCAAGGCCCAGGCATCTAGTGTTCCTACTGCACA
GCCCCAGGCAGAAGGCAGCCTAGCCAAAGCTACTACTGCACCTGCCACTA
CGCGCAATACTGGCCGTGGCGGGGAGGAGAAGAAAAAGGAGAAAGAGAAA
GAAGAACAGGAAGAGAGGGAGACCAAGACCCCTGAATGTCCATCCCATAC
CCAGCCGCTGGGCGTCTATCTCTTGACTCCCGCAGTACAGGACTTGTGGC
TTAGAGATAAGGCCACCTTTACATGTTTCGTCGTGGGCTCTGACCTGAAG
GATGCCCATTTGACTTGGGAGGTTGCCGGAAAGGTACCCACAGGGGGGGT
TGAGGAAGGGTTGCTGGAGCGCCATTCCAATGGCTCTCAGAGCCAGCACT
CAAGACTCACCCTTCCGAGATCCCTGTGGAACGCCGGGACCTCTGTCACA
TGTACTCTAAATCATCCTAGCCTGCCCCCACAGCGTCTGATGGCCCTTAG
AGAGCCAGCCGCCCAGGCACCAGTTAAGCTTAGCCTGAATCTGCTCGCCA
GTAGTGATCCCCCAGAGGCCGCCAGCTGGCTCTTATGCGAAGTGTCCGGC
TTTAGCCCGCCCAACATCTTGCTCATGTGGCTGGAGGACCAGCGAGAAGT
GAACACCAGCGGCTTCGCTCCAGCCCGGCCCCCACCCCAGCCGGGTTCTA
CCACATTCTGGGCCTGGAGTGTCTTAAGGGTCCCAGCACCACCTAGCCCC
CAGCCAGCCACATACACCTGTGTTGTGTCCCATGAAGATAGCAGGACCCT
GCTAAATGCTTCTAGGAGTCTGGAGGTTTCCTACGTGACTGACCATT.

[0414] In one aspect, the transmembrane domain may be recombinant, in which case it will comprise predominantly hydrophobic residues such as leucine and valine. In one aspect a triplet of phenylalanine, tryptophan and valine can be found at each end of a recombinant transmembrane domain.

[0415] Optionally, a short oligo- or polypeptide linker, between 2 and 10 amino acids in length may form the linkage between the transmembrane domain and the cytoplasmic region of the CAR. A glycine-serine doublet provides a particularly suitable linker. For example, in one aspect, the linker comprises the amino acid sequence of GGGGSGGGGS (SEQ ID NO: 10). In some embodiments, the linker is encoded by a nucleotide sequence of

(SEQ ID NO: 11)
GGTGGCGGAGGTTCTGGAGGTGGAGGTTCC.

[0416] In one aspect, the hinge or spacer comprises a KIR2DS2 hinge.

[0417] Cytoplasmic Domain

[0418] The cytoplasmic domain or region of the CAR includes an intracellular signaling domain. An intracellular signaling domain is generally responsible for activation of at least one of the normal effector functions of the immune cell in which the CAR has been introduced. The term “effector function” refers to a specialized function of a cell. Effector function of a T cell, for example, may be cytolytic activity or helper activity including the secretion of cytokines. Thus the term “intracellular signaling domain” refers to the portion of a protein which transduces the effector function signal and directs the cell to perform a specialized function. While usually the entire intracellular signaling domain can be employed, in many cases it is not necessary to use the entire chain. To the extent that a truncated portion of the intracellular signaling domain is used, such truncated portion may be used in place of the intact chain as long as it transduces the effector function signal. The term intracellular signaling domain is thus meant to include any truncated portion of the intracellular signaling domain sufficient to transduce the effector function signal.

[0419] Examples of intracellular signaling domains for use in the CAR of the invention include the cytoplasmic sequences of the T cell receptor (TCR) and co-receptors that act in concert to initiate signal transduction following antigen receptor engagement, as well as any derivative or variant of these sequences and any recombinant sequence that has the same functional capability.

[0420] It is known that signals generated through the TCR alone are insufficient for full activation of the T cell and that a secondary and/or costimulatory signal is also required. Thus, T cell activation can be said to be mediated by two distinct classes of cytoplasmic signaling sequences: those that initiate antigen-dependent primary activation through the TCR (primary intracellular signaling domains) and those that act in an antigen-independent manner to provide a secondary or costimulatory signal (secondary cytoplasmic domain, e.g., a costimulatory domain).

[0421] A primary signaling domain regulates primary activation of the TCR complex either in a stimulatory way, or in an inhibitory way. Primary intracellular signaling domains that act in a stimulatory manner may contain signaling motifs which are known as immunoreceptor tyrosine-based activation motifs or ITAMs.

[0422] Examples of ITAM containing primary intracellular signaling domains that are of particular use in the invention include those of CD3 zeta, common FcR gamma (FCER1G), Fc gamma RIIa, FcR beta (Fc Epsilon Rib), CD3 gamma, CD3 delta, CD3 epsilon, CD79a, CD79b, DAP10, and DAP12. In one embodiment, a CAR of the invention comprises an intracellular signaling domain, e.g., a primary signaling domain of CD3-zeta.

[0423] In one embodiment, a primary signaling domain comprises a modified ITAM domain, e.g., a mutated ITAM domain which has altered (e.g., increased or decreased) activity as compared to the native ITAM domain. In one embodiment, a primary signaling domain comprises a modified ITAM-containing primary intracellular signaling domain, e.g., an optimized and/or truncated ITAM-containing primary intracellular signaling domain. In an embodiment, a primary signaling domain comprises one, two, three, four or more ITAM motifs.

[0424] The intracellular signalling domain of the CAR can comprise the CD3-zeta signaling domain by itself or it can be combined with any other desired intracellular signaling domain(s) useful in the context of a CAR of the invention. For example, the intracellular signaling domain of the CAR can comprise a CD3 zeta chain portion and a costimulatory signaling domain. The costimulatory signaling domain refers to a portion of the CAR comprising the intracellular domain of a costimulatory molecule. A costimulatory molecule is a cell surface molecule other than an antigen receptor or its ligands that is required for an efficient response of lymphocytes to an antigen. Examples of such molecules include CD27, CD28, 4-1BB (CD137), OX40, CD30, CD40, PD-1, ICOS, lymphocyte function-associated antigen-1 (LFA-1), CD2, CD7, LIGHT, NKG2C, B7-H3, and a ligand that specifically binds with CD83, and the like. For example, CD27 costimulation has been demonstrated to enhance expansion, effector function, and survival of human CART cells in vitro and augments human T cell persistence and antitumor activity in vivo (Song et al. Blood. 2012; 119(3):696-706). Further examples of such costimulatory molecules include CDS, ICAM-1, GITR, BAFFR, HVEM (LIGHTR), SLAMF7, NKp80 (KLRF1), NKp44, NKp30, NKp46, CD160, CD19, CD4, CD8alpha, CD8beta, IL2R beta, IL2R gamma, IL7R alpha, ITGA4, VLA1, CD49a, ITGA4, IA4, CD49D, ITGA6, VLA-6, CD49f, ITGAD, CD11d, ITGAE, CD103, ITGAL, CD11a, LFA-1, ITGAM, CD11b, ITGAX, CD11c, ITGB1, CD29, ITGB2, CD18, LFA-1, ITGB7, TNFR2, TRANCE/RANKL, DNAM1 (CD226), SLAMF4 (CD244, 2B4), CD84, CD96 (Tactile), NKG2D, CEACAM1, CRTAM, Ly9 (CD229), CD160 (BY55), PSGL1, CD100 (SEMA4D), CD69, SLAMF6 (NTB-A, Ly108), SLAM (SLAMF1, CD150, IPO-3), BLAME (SLAMF8), SELPLG (CD162), LTBR, LAT, GADS, SLP-76, PAG/Cbp, and CD19a.

[0425] The intracellular signaling sequences within the cytoplasmic portion of the CAR of the invention may be linked to each other in a random or specified order. Optionally, a short oligo- or polypeptide linker, for example, between 2 and 10 amino acids (e.g., 2, 3, 4, 5, 6, 7, 8, 9, or 10 amino acids) in length may form the linkage between intracellular signaling sequence. In one embodiment, a glycine-serine doublet can be used as a suitable linker. In one embodiment, a single amino acid, e.g., an alanine, a glycine, can be used as a suitable linker.

[0426] In one aspect, the intracellular signaling domain is designed to comprise two or more, e.g., 2, 3, 4, 5, or more, costimulatory signaling domains. In an embodiment, the two or more, e.g., 2, 3, 4, 5, or more, costimulatory signaling domains, are separated by a linker molecule, e.g., a linker molecule described herein. In one embodiment, the intracellular signaling domain comprises two costimulatory signaling domains. In some embodiments, the linker molecule is a glycine residue. In some embodiments, the linker is an alanine residue.

[0427] In one aspect, the intracellular signaling domain is designed to comprise the signaling domain of CD3-zeta and the signaling domain of CD28. In one aspect, the intracellular signaling domain is designed to comprise the signaling domain of CD3-zeta and the signaling domain of 4-1BB. In one aspect, the signaling domain of 4-1BB is a signaling domain of SEQ ID NO: 14. In one aspect, the signaling domain of CD3-zeta is a signaling domain of SEQ ID NO: 18.

[0428] In one aspect, the intracellular signaling domain is designed to comprise the signaling domain of CD3-zeta and the signaling domain of CD27. In one aspect, the signaling domain of CD27 comprises an amino acid sequence of

(SEQ ID NO: 16)
QRRKYRSNKGESPVEPAEPCRYSCPREEEGSTIPIQEDYRKPEPACSP.

In one aspect, the signalling domain of CD27 is encoded by a nucleic acid sequence of

(SEQ ID NO: 17)
AGGAGTAAGAGGAGCAGGCTCCTGCACAGTGACTACATGAACATGACTCC
CCGCCGCCCCGGGCCCACCCGCAAGCATTACCAGCCCTATGCCCCACCAC
GCGACTTCGCAGCCTATCGCTCC.

[0429] In one aspect, the CAR-expressing cell described herein can further comprise a second CAR, e.g., a second CAR that includes a different antigen binding domain, e.g., to the same target or a different target (e.g., a target other than a cancer associated antigen described herein or a different cancer associated antigen described herein). In one embodiment, the second CAR includes an antigen binding domain to a target expressed the same cancer cell type as the cancer associated antigen. In one embodiment, the CAR-expressing cell comprises a first CAR that targets a first antigen and includes an intracellular signaling domain having a costimulatory signaling domain but not a primary signaling domain, and a second CAR that targets a second, different, antigen and includes an intracellular signaling domain having a primary signaling domain but not a costimulatory signaling domain. While not wishing to be bound by theory, placement of a costimulatory signaling domain, e.g., 4-1BB, CD28, CD27 or OX-40, onto the first CAR, and the primary signaling domain, e.g., CD3 zeta, on the second CAR can limit the CAR activity to cells where both targets are expressed. In one embodiment, the CAR expressing cell comprises a first cancer associated antigen CAR that includes an antigen binding domain that binds a target antigen described herein, a transmembrane domain and a costimulatory domain and a second CAR that targets a different target antigen (e.g., an antigen expressed on that same cancer cell type as the first target antigen) and includes an antigen binding domain, a transmembrane domain and a primary signaling domain. In another embodiment, the CAR expressing cell comprises a first CAR that includes an antigen binding domain that binds a target antigen described herein, a transmembrane domain and a primary signaling domain and a second CAR that targets an antigen other than the first target antigen (e.g., an antigen expressed on the same cancer cell type as the first target antigen) and includes an antigen binding domain to the antigen, a transmembrane domain and a costimulatory signaling domain.

[0430] In one embodiment, the CAR-expressing cell comprises an XCAR described herein and an inhibitory CAR. In one embodiment, the inhibitory CAR comprises an antigen binding domain that binds an antigen found on normal cells but not cancer cells, e.g., normal cells that also express CLL. In one embodiment, the inhibitory CAR comprises the antigen binding domain, a transmembrane domain and an intracellular domain of an inhibitory molecule. For example, the intracellular domain of the inhibitory CAR can be an intracellular domain of PD1, PD-L1, CTLA4, TIM3, CEACAM (e.g., CEACAM-1, CEACAM-3 and/or CEACAM-5), LAG3, VISTA, BTLA, TIGIT, LAIR1, CD160, 2B4 or TGF beta.

[0431] In one embodiment, when the CAR-expressing cell comprises two or more different CARs, the antigen binding domains of the different CARs can be such that the antigen binding domains do not interact with one another. For example, a cell expressing a first and second CAR can have an antigen binding domain of the first CAR, e.g., as a fragment, e.g., an scFv, that does not form an association with the antigen binding domain of the second CAR, e.g., the antigen binding domain of the second CAR is a VHH.

[0432] In some embodiments, the antigen binding domain comprises a single domain antigen binding (SDAB) molecules include molecules whose complementary determining regions are part of a single domain polypeptide. Examples include, but are not limited to, heavy chain variable domains, binding molecules naturally devoid of light chains, single domains derived from conventional 4-chain antibodies, engineered domains and single domain scaffolds other than those derived from antibodies. SDAB molecules may be any of the art, or any future single domain molecules. SDAB molecules may be derived from any species including, but not limited to mouse, human, camel, llama, lamprey, fish, shark, goat, rabbit, and bovine. This term also includes naturally occurring single domain antibody molecules from species other than Camelidae and sharks.

[0433] In one aspect, an SDAB molecule can be derived from a variable region of the immunoglobulin found in fish, such as, for example, that which is derived from the immunoglobulin isotype known as Novel Antigen Receptor (NAR) found in the serum of shark. Methods of producing single domain molecules derived from a variable region of NAR (“IgNARs”) are described in WO 03/014161 and Streltsov (2005) Protein Sci. 14:2901-2909.

[0434] According to another aspect, an SDAB molecule is a naturally occurring single domain antigen binding molecule known as heavy chain devoid of light chains. Such single domain molecules are disclosed in WO 9404678 and Hamers-Casterman, C. et al. (1993) Nature 363:446-448, for example. For clarity reasons, this variable domain derived from a heavy chain molecule naturally devoid of light chain is known herein as a VHH or nanobody to distinguish it from the conventional VH of four chain immunoglobulins. Such a VHH molecule can be derived from Camelidae species, for example in camel, llama, dromedary, alpaca and guanaco. Other species besides Camelidae may produce heavy chain molecules naturally devoid of light chain; such VHHs are within the scope of the invention.

[0435] The SDAB molecules can be recombinant, CDR-grafted, humanized, camelized, de-immunized and/or in vitro generated (e.g., selected by phage display).

[0436] It has also been discovered, that cells having a plurality of chimeric membrane embedded receptors comprising an antigen binding domain that interactions between the antigen binding domain of the receptors can be undesirable, e.g., because it inhibits the ability of one or more of the antigen binding domains to bind its cognate antigen. Accordingly, disclosed herein are cells having a first and a second non-naturally occurring chimeric membrane embedded receptor comprising antigen binding domains that minimize such interactions. Also disclosed herein are nucleic acids encoding a first and a second non-naturally occurring chimeric membrane embedded receptor comprising a antigen binding domains that minimize such interactions, as well as methods of making and using such cells and nucleic acids. In an embodiment the antigen binding domain of one of said first said second non-naturally occurring chimeric membrane embedded receptor, comprises an scFv, and the other comprises a single VH domain, e.g., a camelid, shark, or lamprey single VH domain, or a single VH domain derived from a human or mouse sequence.

[0437] In some embodiments, the claimed invention comprises a first and second CAR, wherein the antigen binding domain of one of said first CAR said second CAR does not comprise a variable light domain and a variable heavy domain. In some embodiments, the antigen binding domain of one of said first CAR said second CAR is an scFv, and the other is not an scFv. In some embodiments, the antigen binding domain of one of said first CAR said second CAR comprises a single VH domain, e.g., a camelid, shark, or lamprey single VH domain, or a single VH domain derived from a human or mouse sequence. In some embodiments, the antigen binding domain of one of said first CAR said second CAR comprises a nanobody. In some embodiments, the antigen binding domain of one of said first CAR said second CAR comprises a camelid VHH domain.

[0438] In some embodiments, the antigen binding domain of one of said first CAR said second CAR comprises an scFv, and the other comprises a single VH domain, e.g., a camelid, shark, or lamprey single VH domain, or a single VH domain derived from a human or mouse sequence. In some embodiments, the antigen binding domain of one of said first CAR said second CAR comprises an scFv, and the other comprises a nanobody. In some embodiments, the antigen binding domain of one of said first CAR said second CAR comprises an scFv, and the other comprises a camelid VHH domain.

[0439] In some embodiments, when present on the surface of a cell, binding of the antigen binding domain of said first CAR to its cognate antigen is not substantially reduced by the presence of said second CAR. In some embodiments, binding of the antigen binding domain of said first CAR to its cognate antigen in the presence of said second CAR is 85%, 90%, 95%, 96%, 97%, 98% or 99% of binding of the antigen binding domain of said first CAR to its cognate antigen in the absence of said second CAR.

[0440] In some embodiments, when present on the surface of a cell, the antigen binding domains of said first CAR said second CAR, associate with one another less than if both were scFv antigen binding domains. In some embodiments, the antigen binding domains of said first CAR said second CAR, associate with one another 85%, 90%, 95%, 96%, 97%, 98% or 99% less than if both were scFv antigen binding domains.

[0441] In another aspect, the CAR-expressing cell described herein can further express another agent, e.g., an agent which enhances the activity of a CAR-expressing cell. For example, in one embodiment, the agent can be an agent which inhibits an inhibitory molecule. Inhibitory molecules, e.g., PD1, can, in some embodiments, decrease the ability of a CAR-expressing cell to mount an immune effector response. Examples of inhibitory molecules include PD1, PD-L1, CTLA4, TIM3, CEACAM (e.g., CEACAM-1, CEACAM-3 and/or CEACAM-5), LAG3, VISTA, BTLA, TIGIT, LAIR1, CD160, 2B4 and TGF beta. In one embodiment, the agent which inhibits an inhibitory molecule, e.g., is a molecule described herein, e.g., an agent that comprises a first polypeptide, e.g., an inhibitory molecule, associated with a second polypeptide that provides a positive signal to the cell, e.g., an intracellular signaling domain described herein. In one embodiment, the agent comprises a first polypeptide, e.g., of an inhibitory molecule such as PD1, PD-L1, CTLA4, TIM3, CEACAM (e.g., CEACAM-1, CEACAM-3 and/or CEACAM-5), LAG3, VISTA, BTLA, TIGIT, LAIR1, CD160, 2B4 or TGF beta, or a fragment of any of these (e.g., at least a portion of an extracellular domain of any of these), and a second polypeptide which is an intracellular signaling domain described herein (e.g., comprising a costimulatory domain (e.g., 41BB, CD27 or CD28, e.g., as described herein) and/or a primary signaling domain (e.g., a CD3 zeta signaling domain described herein). In one embodiment, the agent comprises a first polypeptide of PD1 or a fragment thereof (e.g., at least a portion of an extracellular domain of PD1), and a second polypeptide of an intracellular signaling domain described herein (e.g., a CD28 signaling domain described herein and/or a CD3 zeta signaling domain described herein). PD1 is an inhibitory member of the CD28 family of receptors that also includes CD28, CTLA-4, ICOS, and BTLA. PD-1 is expressed on activated B cells, T cells and myeloid cells (Agata et al. 1996 Int. Immunol 8:765-75). Two ligands for PD1, PD-L1 and PD-L2 have been shown to downregulate T cell activation upon binding to PD1 (Freeman et a. 2000 J Exp Med 192:1027-34; Latchman et al. 2001 Nat Immunol 2:261-8; Carter et al. 2002 Eur J Immunol 32:634-43). PD-L1 is abundant in human cancers (Dong et al. 2003 J Mol Med 81:281-7; Blank et al. 2005 Cancer Immunol. Immunother 54:307-314; Konishi et al. 2004 Clin Cancer Res 10:5094). Immune suppression can be reversed by inhibiting the local interaction of PD1 with PD-L1.

[0442] In one embodiment, the agent comprises the extracellular domain (ECD) of an inhibitory molecule, e.g., Programmed Death 1 (PD1), fused to a transmembrane domain and intracellular signaling domains such as 41BB and CD3 zeta (also referred to herein as a PD1 CAR). In one embodiment, the PD1 CAR, when used in combinations with a XCAR described herein, improves the persistence of the T cell. In one embodiment, the CAR is a PD1 CAR comprising the extracellular domain of PD1 indicated as underlined in SEQ ID NO: 26. In one embodiment, the PD1 CAR comprises the amino acid sequence of SEQ ID NO: 26.

(SEQ ID NO: 26)
Malpvtalllplalllhaarppgwfldspdrpwnp
ptfspallvvtegdnatftcsfsntsesfvlnwyr
mspsngtdklaafpedrsapgqdcrfrvtalpngr
dfhmsvvrarrndsgtylcgaislapkaqikeslr
aelrvterraevptahpspsprpagqfatlvtttp
aprpptpaptiasqplslrpeacrpaaggavhtrg
ldfacdiyiwaplagtcgvillslvitlyckrgrk
kllyifkqpfmrpvqttqeedgcscrfpeeeeggc
elrvkfsrsadapaykqgqnqlynelnlgrreeyd
vldkrrgrdpemggkprrknpqeglynelqkdkma
eayseigmkgerrrgkghdglyqglstatkdtyda
lhmqalppr.

[0443] In one embodiment, the PD1 CAR comprises the amino acid sequence provided below (SEQ ID NO: 39).

(SEQ ID NO: 39)
pgwfldspdrpwnpptfspallvvtegdnatftcs
fsntsesfvlnwyrmspsngtdklaafpedrsapg
adcrfrvtalpngrdfhmsvvrarrndsgtylcga
islapkaqikeslraelrvterraevptahpspsp
rpagqfqtlvtttpaprpptpaptiasqplslrpe
acrpaaggavhtrgldfacdiyiwaplagtcgvil
lslvitlyckrgrkkllyifkqpfmrpvqttqeed
gcscrfpeeeeggcelrvkfsrsadapaykqgqnq
lynelnlgrreeydvldkrrgrdpemggkprrknp
qeglynelqkdkmaeayseigmkgerrrgkghdgl
yqglstatkdtydalhmqalppr.

[0444] In one embodiment, the agent comprises a nucleic acid sequence encoding the PD1 CAR, e.g., the PD1 CAR described herein. In one embodiment, the nucleic acid sequence for the PD1 CAR is shown below, with the PD1 ECD underlined below in SEQ ID NO: 27.

(SEQ ID NO: 27)
atggccctccctgtcactgccctgcttctccccct
cgcactcctgctccacgccgctagaccacccggat
ggtttctggactctccggatcgcccgtggaatccc
ccaaccttctcaccggcactcttggttgtgactga
gggcgataatgcgaccttcacgtgctcgttctcca
acacctccgaatcattcgtgctgaactggtaccgc
atgagcccgtcaaaccagaccgacaagctcgccgc
gtttccggaagatcggtcgcaaccgggacaggatt
gtcggttccgcgtgactcaactgccgaatggcaga
gacttccacatgagcgtggtccgcgctaggcgaaa
cgactccgggacctacctgtgcggagccatctcgc
tggcgcctaaggcccaaatcaaagagagcttgagg
gccgaactgagagtgaccgagcgcagagctgaggt
gccaactgcacatccatccccatcgcctcggcctg
cggggcagtttcagaccctggtcacgaccactccg
gcgccgcgcccaccgactccggccccaactatcgc
gagccagcccctgtcgctgaggccggaagcatgcc
gccctgccgccggaggtgctgtgcatacccgggga
ttggacttcgcatgcgacatctacatttgggctcc
tctcgccggaacttgtggcgtgctccttctgtccc
tggtcatcaccctgtactgcaagcggggtcggaaa
aagcttctgtacattttcaagcagcccttcatgag
gcccgtgcaaaccacccaggaggaggacggttgct
cctgccggttccccgaagaggaagaaggaggttgc
gagctgcgcgtgaagttctcccggagcgccgacgc
ccccgcctataagcagggccagaaccagctgtaca
acgaactgaacctgggacggcgggaagagtacgat
gtgctggacaagcggcgcggccgggaccccgaaat
gggcgggaagcctagaagaaagaaccctcaggaag
gcctgtataacgagctgcagaaggacaagatggcc
gaggcctactccgaaattgggatgaagggagagcg
gcggaggggaaaggggcacgacggcctgtaccaag
gactgtccaccgccaccaaggacacatacgatgcc
ctgcacatgcaggcccttccccctcgc.

[0445] In another aspect, the present invention provides a population of CAR-expressing cells, e.g., CART cells. In some embodiments, the population of CAR-expressing cells comprises a mixture of cells expressing different CARs. For example, in one embodiment, the population of CART cells can include a first cell expressing a CAR having an antigen binding domain to a cancer associated antigen described herein, and a second cell expressing a CAR having a different antigen binding domain, e.g., an antigen binding domain to a different a cancer associated antigen described herein, e.g., an antigen binding domain to a cancer associated antigen described herein that differs from the cancer associated antigen bound by the antigen binding domain of the CAR expressed by the first cell. As another example, the population of CAR-expressing cells can include a first cell expressing a CAR that includes an antigen binding domain to a cancer associated antigen described herein, and a second cell expressing a CAR that includes an antigen binding domain to a target other than a cancer associated antigen as described herein. In one embodiment, the population of CAR-expressing cells includes, e.g., a first cell expressing a CAR that includes a primary intracellular signaling domain, and a second cell expressing a CAR that includes a secondary signaling domain.

[0446] In another aspect, the present invention provides a population of cells wherein at least one cell in the population expresses a CAR having an antigen binding domain to a cancer associated antigen described herein, and a second cell expressing another agent, e.g., an agent which enhances the activity of a CAR-expressing cell. For example, in one embodiment, the agent can be an agent which inhibits an inhibitory molecule. Inhibitory molecules, e.g., PD-1, can, in some embodiments, decrease the ability of a CAR-expressing cell to mount an immune effector response. Examples of inhibitory molecules include PD-1, PD-L1, CTLA4, TIM3, CEACAM (e.g., CEACAM-1, CEACAM-3 and/or CEACAM-5), LAG3, VISTA, BTLA, TIGIT, LAIR1, CD160, 2B4 and TGF beta. In one embodiment, the agent which inhibits an inhibitory molecule, e.g., is a molecule described herein, e.g., an agent that comprises a first polypeptide, e.g., an inhibitory molecule, associated with a second polypeptide that provides a positive signal to the cell, e.g., an intracellular signaling domain described herein. In one embodiment, the agent comprises a first polypeptide, e.g., of an inhibitory molecule such as PD-1, PD-L1, CTLA4, TIM3, CEACAM (e.g., CEACAM-1, CEACAM-3 and/or CEACAM-5), LAG3, VISTA, BTLA, TIGIT, LAIR1, CD160, 2B4 or TGF beta, or a fragment of any of these, and a second polypeptide which is an intracellular signaling domain described herein (e.g., comprising a costimulatory domain (e.g., 41BB, CD27, OX40 or CD28, e.g., as described herein) and/or a primary signaling domain (e.g., a CD3 zeta signaling domain described herein). In one embodiment, the agent comprises a first polypeptide of PD-1 or a fragment thereof, and a second polypeptide of an intracellular signaling domain described herein (e.g., a CD28 signaling domain described herein and/or a CD3 zeta signaling domain described herein).

[0447] In one aspect, the present invention provides methods comprising administering a population of CAR-expressing cells, e.g., CART cells, e.g., a mixture of cells expressing different CARs, in combination with another agent, e.g., a kinase inhibitor, such as a kinase inhibitor described herein. In another aspect, the present invention provides methods comprising administering a population of cells wherein at least one cell in the population expresses a CAR having an antigen binding domain of a cancer associated antigen described herein, and a second cell expressing another agent, e.g., an agent which enhances the activity of a CAR-expressing cell, in combination with another agent, e.g., a kinase inhibitor, such as a kinase inhibitor described herein.

### Regulatable Chimeric Antigen Receptors

[0448] In some embodiments, a regulatable CAR (RCAR) where the CAR activity can be controlled is desirable to optimize the safety and efficacy of a CAR therapy. There are many ways CAR activities can be regulated. For example, inducible apoptosis using, e.g., a caspase fused to a dimerization domain (see, e.g., Di et al., N Egnl. J. Med. 2011 Nov. 3; 365(18):1673-1683), can be used as a safety switch in the CAR therapy of the instant invention. In an aspect, a RCAR comprises a set of polypeptides, typically two in the simplest embodiments, in which the components of a standard CAR described herein, e.g., an antigen binding domain and an intracellular signaling domain, are partitioned on separate polypeptides or members. In some embodiments, the set of polypeptides include a dimerization switch that, upon the presence of a dimerization molecule, can couple the polypeptides to one another, e.g., can couple an antigen binding domain to an intracellular signaling domain.

[0449] In an aspect, an RCAR comprises two polypeptides or members: 1) an intracellular signaling member comprising an intracellular signaling domain, e.g., a primary intracellular signaling domain described herein, and a first switch domain; 2) an antigen binding member comprising an antigen binding domain, e.g., that targets a tumor antigen described herein, as described herein and a second switch domain. Optionally, the RCAR comprises a transmembrane domain described herein. In an embodiment, a transmembrane domain can be disposed on the intracellular signaling member, on the antigen binding member, or on both. (Unless otherwise indicated, when members or elements of an RCAR are described herein, the order can be as provided, but other orders are included as well. In other words, in an embodiment, the order is as set out in the text, but in other embodiments, the order can be different. E.g., the order of elements on one side of a transmembrane region can be different from the example, e.g., the placement of a switch domain relative to a intracellular signaling domain can be different, e.g., reversed).

[0450] In an embodiment, the first and second switch domains can form an intracellular or an extracellular dimerization switch. In an embodiment, the dimerization switch can be a homodimerization switch, e.g., where the first and second switch domain are the same, or a heterodimerization switch, e.g., where the first and second switch domain are different from one another.

[0451] In embodiments, an RCAR can comprise a “multi switch.” A multi switch can comprise heterodimerization switch domains or homodimerization switch domains. A multi switch comprises a plurality of, e.g., 2, 3, 4, 5, 6, 7, 8, 9, or 10, switch domains, independently, on a first member, e.g., an antigen binding member, and a second member, e.g., an intracellular signaling member. In an embodiment, the first member can comprise a plurality of first switch domains, e.g., FKBP-based switch domains, and the second member can comprise a plurality of second switch domains, e.g., FRB-based switch domains. In an embodiment, the first member can comprise a first and a second switch domain, e.g., a FKBP-based switch domain and a FRB-based switch domain, and the second member can comprise a first and a second switch domain, e.g., a FKBP-based switch domain and a FRB-based switch domain.

[0452] In an embodiment, the intracellular signaling member comprises one or more intracellular signaling domains, e.g., a primary intracellular signaling domain and one or more costimulatory signaling domains.

[0453] In an embodiment, the antigen binding member may comprise one or more intracellular signaling domains, e.g., one or more costimulatory signaling domains. In an embodiment, the antigen binding member comprises a plurality, e.g., 2 or 3 costimulatory signaling domains described herein, e.g., selected from 41BB, CD28, CD27, ICOS, and OX40, and in embodiments, no primary intracellular signaling domain. In an embodiment, the antigen binding member comprises the following costimulatory signaling domains, from the extracellular to intracellular direction: 41BB-CD27; 41BB-CD27; CD27-41BB; 41BB-CD28; CD28-41BB; OX40-CD28; CD28-OX40; CD28-41BB; or 41BB-CD28. In such embodiments, the intracellular binding member comprises a CD3zeta domain. In one such embodiment the RCAR comprises (1) an antigen binding member comprising, an antigen binding domain, a transmembrane domain, and two costimulatory domains and a first switch domain; and (2) an intracellular signaling domain comprising a transmembrane domain or membrane tethering domain and at least one primary intracellular signaling domain, and a second switch domain.

[0454] An embodiment provides RCARs wherein the antigen binding member is not tethered to the surface of the CAR cell. This allows a cell having an intracellular signaling member to be conveniently paired with one or more antigen binding domains, without transforming the cell with a sequence that encodes the antigen binding member. In such embodiments, the RCAR comprises: 1) an intracellular signaling member comprising: a first switch domain, a transmembrane domain, an intracellular signaling domain, e.g., a primary intracellular signaling domain, and a first switch domain; and 2) an antigen binding member comprising: an antigen binding domain, and a second switch domain, wherein the antigen binding member does not comprise a transmembrane domain or membrane tethering domain, and, optionally, does not comprise an intracellular signaling domain. In some embodiments, the RCAR may further comprise 3) a second antigen binding member comprising: a second antigen binding domain, e.g., a second antigen binding domain that binds a different antigen than is bound by the antigen binding domain; and a second switch domain.

[0455] Also provided herein are RCARs wherein the antigen binding member comprises bispecific activation and targeting capacity. In this embodiment, the antigen binding member can comprise a plurality, e.g., 2, 3, 4, or 5 antigen binding domains, e.g., scFvs, wherein each antigen binding domain binds to a target antigen, e.g. different antigens or the same antigen, e.g., the same or different epitopes on the same antigen. In an embodiment, the plurality of antigen binding domains are in tandem, and optionally, a linker or hinge region is disposed between each of the antigen binding domains. Suitable linkers and hinge regions are described herein.

[0456] An embodiment provides RCARs having a configuration that allows switching of proliferation. In this embodiment, the RCAR comprises: 1) an intracellular signaling member comprising: optionally, a transmembrane domain or membrane tethering domain; one or more co-stimulatory signaling domain, e.g., selected from 41BB, CD28, CD27, ICOS, and OX40, and a switch domain; and 2) an antigen binding member comprising: an antigen binding domain, a transmembrane domain, and a primary intracellular signaling domain, e.g., a CD3zeta domain, wherein the antigen binding member does not comprise a switch domain, or does not comprise a switch domain that dimerizes with a switch domain on the intracellular signaling member. In an embodiment, the antigen binding member does not comprise a co-stimulatory signaling domain. In an embodiment, the intracellular signaling member comprises a switch domain from a homodimerization switch. In an embodiment, the intracellular signaling member comprises a first switch domain of a heterodimerization switch and the RCAR comprises a second intracellular signaling member which comprises a second switch domain of the heterodimerization switch. In such embodiments, the second intracellular signaling member comprises the same intracellular signaling domains as the intracellular signaling member. In an embodiment, the dimerization switch is intracellular. In an embodiment, the dimerization switch is extracellular.

[0457] In any of the RCAR configurations described here, the first and second switch domains comprise a FKBP-FRB based switch as described herein.

[0458] Also provided herein are cells comprising an RCAR described herein. Any cell that is engineered to express a RCAR can be used as a RCARX cell. In an embodiment the RCARX cell is a T cell, and is referred to as a RCART cell. In an embodiment the RCARX cell is an NK cell, and is referred to as a RCARN cell.

[0459] Also provided herein are nucleic acids and vectors comprising RCAR encoding sequences. Sequence encoding various elements of an RCAR can be disposed on the same nucleic acid molecule, e.g., the same plasmid or vector, e.g., viral vector, e.g., lentiviral vector. In an embodiment, (i) sequence encoding an antigen binding member and (ii) sequence encoding an intracellular signaling member, can be present on the same nucleic acid, e.g., vector. Production of the corresponding proteins can be achieved, e.g., by the use of separate promoters, or by the use of a bicistronic transcription product (which can result in the production of two proteins by cleavage of a single translation product or by the translation of two separate protein products). In an embodiment, a sequence encoding a cleavable peptide, e.g., a P2A or F2A sequence, is disposed between (i) and (ii). Examples of peptide cleavage sites include the following, wherein the GSG residues are optional:

T2A:
(SEQ ID NO: 68)
(GSG) E G R G S L L T C G D V E E N P G P
P2A:
(SEQ ID NO: 69)
(GSG) A T N F S L L K Q A G D V E E N P G P
E2A:
(SEQ ID NO: 70)
(GSG)Q C T N Y A L L K L A G D V E S N P G P
F2A:
(SEQ ID NO: 71)
(GSG) V K Q T L N F D L L K L A G D V E S N P G P

[0460] In an embodiment, a sequence encoding an IRES, e.g., an EMCV or EV71 IRES, is disposed between (i) and (ii). In these embodiments, (i) and (ii) are transcribed as a single RNA. In an embodiment, a first promoter is operably linked to (i) and a second promoter is operably linked to (ii), such that (i) and (ii) are transcribed as separate mRNAs.

[0461] Alternatively, the sequence encoding various elements of an RCAR can be disposed on the different nucleic acid molecules, e.g., different plasmids or vectors, e.g., viral vector, e.g., lentiviral vector. E.g., the (i) sequence encoding an antigen binding member can be present on a first nucleic acid, e.g., a first vector, and the (ii) sequence encoding an intracellular signaling member can be present on the second nucleic acid, e.g., the second vector.

[0462] Dimerization Switches

[0463] Dimerization switches can be non-covalent or covalent. In a non-covalent dimerization switch, the dimerization molecule promotes a non-covalent interaction between the switch domains. In a covalent dimerization switch, the dimerization molecule promotes a covalent interaction between the switch domains.

[0464] In an embodiment, the RCAR comprises a FKBP/FRAP, or FKBP/FRB-based dimerization switch. FKBP12 (FKBP, or FK506 binding protein) is an abundant cytoplasmic protein that serves as the initial intracellular target for the natural product immunosuppressive drug, rapamycin. Rapamycin binds to FKBP and to the large PI3K homolog FRAP (RAFT, mTOR). FRB is a 93 amino acid portion of FRAP, that is sufficient for binding the FKBP-rapamycin complex (Chen, J., Zheng, X. F., Brown, E. J. & Schreiber, S. L. (1995) Identification of an 11-kDa FKBP12-rapamycin-binding domain within the 289-kDa FKBP12-rapamycin-associated protein and characterization of a critical serine residue. Proc Natl Acad Sci USA 92: 4947-51.)

[0465] In embodiments, an FKBP/FRAP, e.g., an FKBP/FRB, based switch can use a dimerization molecule, e.g., rapamycin or a rapamycin analog.

[0466] The amino acid sequence of FKBP is as follows:

(SEQ ID NO: 54)
D V P D Y A S L G G P S S P K K K
R K V S R G V Q V E T I S P G D G
R T F P K R G Q T C V V H Y T G M
L E D G K K F D S S R D R N K P F
K F M L G K Q E V I R G W E E G V
A Q M S V G Q R A K L T I S P D Y
A Y G A T G H P G I I P P H A T L
V F D V E L L K L E T S Y

[0467] In embodiments, an FKBP switch domain can comprise a fragment of FKBP having the ability to bind with FRB, or a fragment or analog thereof, in the presence of rapamycin or a rapalog, e.g., the underlined portion of SEQ ID NO: 54, which is:

(SEQ ID NO: 55)
V Q V E T I S P G D G R T F P K R
G Q T C V V H Y T G M L E D G K K
F D S S R D R N K P F K F M L G K
Q E V I R G W E E G V A Q M S V G
Q R A K L T I S P D Y A Y G A T G
H P G I I P P H A T L V F D V E L
L K L E T S

[0468] The amino acid sequence of FRB is as follows:

(SEQ ID NO: 56)
ILWHEMWHEG LEEASRLYFG ERNVKGMFEV
LEPLHAMMER GPQTLKETSF NQAYGRDLME
AQEWCRKYMK SGNVKDLTQA WDLYYHVFRR
ISK

[0469] “FKBP/FRAP, e.g., an FKBP/FRB, based switch” as that term is used herein, refers to a dimerization switch comprising: a first switch domain, which comprises an FKBP fragment or analog thereof having the ability to bind with FRB, or a fragment or analog thereof, in the presence of rapamycin or a rapalog, e.g., RAD001, and has at least 70, 75, 80, 85, 90, 95, 96, 97, 98, or 99% identity with, or differs by no more than 30, 25, 20, 15, 10, 5, 4, 3, 2, or 1 amino acid residues from, the FKBP sequence of SEQ ID NO: 54 or 55; and a second switch domain, which comprises an FRB fragment or analog thereof having the ability to bind with FRB, or a fragment or analog thereof, in the presence of rapamycin or a rapalog, and has at least 70, 75, 80, 85, 90, 95, 96, 97, 98, or 99% identity with, or differs by no more than 30, 25, 20, 15, 10, 5, 4, 3, 2, or 1 amino acid residues from, the FRB sequence of SEQ ID NO: 56. In an embodiment, a RCAR described herein comprises one switch domain comprises amino acid residues disclosed in SEQ ID NO: 54 (or SEQ ID NO: 55), and one switch domain comprises amino acid residues disclosed in SEQ ID NO: 56.

[0470] In embodiments, the FKBP/FRB dimerization switch comprises a modified FRB switch domain that exhibits altered, e.g., enhanced, complex formation between an FRB-based switch domain, e.g., the modified FRB switch domain, a FKBP-based switch domain, and the dimerization molecule, e.g., rapamycin or a rapalogue, e.g., RAD001. In an embodiment, the modified FRB switch domain comprises one or more mutations, e.g., 2, 3, 4, 5, 6, 7, 8, 9, 10 or more, selected from mutations at amino acid position(s) L2031, E2032, S2035, R2036, F2039, G2040, T2098, W2101, D2102, Y2105, and F2108, where the wild-type amino acid is mutated to any other naturally-occurring amino acid. In an embodiment, a mutant FRB comprises a mutation at E2032, where E2032 is mutated to phenylalanine (E2032F), methionine (E2032M), arginine (E2032R), valine (E2032V), tyrosine (E2032Y), isoleucine (E2032I), e.g., SEQ ID NO: 57, or leucine (E2032L), e.g., SEQ ID NO: 58. In an embodiment, a mutant FRB comprises a mutation at T2098, where T2098 is mutated to phenylalanine (T2098F) or leucine (T2098L), e.g., SEQ ID NO: 59. In an embodiment, a mutant FRB comprises a mutation at E2032 and at T2098, where E2032 is mutated to any amino acid, and where T2098 is mutated to any amino acid, e.g., SEQ ID NO: 60. In an embodiment, a mutant FRB comprises an E20321 and a T2098L mutation, e.g., SEQ ID NO: 61. In an embodiment, a mutant FRB comprises an E2032L and a T2098L mutation, e.g., SEQ ID NO: 62.

TABLE 10
Exemplary mutant FRB having increased affinity
for a dimerization molecule

| | | SEQ ID |
|---|---|---|
| FRB mutant | Amino Acid Sequence | NO: |
| E2032I | ILWHEMWHEGLIEASRLYFGERN | 57 |
| mutant | VKGMFEVLEPLHAMMERGPQTLK | |
| | ETSFNQAYGRDLMEAQEWCRKYM | |
| | KSGNVKDLTQAWDLYYHVFRRIS | |
| | KTS | |
| E2032L | ILWHEMWHEGLLEASRLYFGERN | 58 |
| mutant | VKGMFEVLEPLHAMMERGPQTLK | |
| | ETSFNQAYGRDLMEAQEWCRKYM | |
| | KSGNVKDLTQAWDLYYHVFRRIS | |
| | KTS | |
| T2098L | ILWHEMWHEGLEEASRLYFGERN | 59 |
| mutant | VKGMFEVLEPLHAMMERGPQTLK | |
| | ETSFNQAYGRDLMEAQEWCRKYM | |
| | KSGNVKDLLQAWDLYYHVFRRIS | |
| | KTS | |
| E2032, | ILWHEMWHEGLXEASRLYFGERN | 60 |
| T2098 | VKGMFEVLEPLHAMMERGPQTLK | |
| mutant | | |
| | ETSFNQAYGRDLMEAQEWCRKYM | |
| | KSGNVKDLXQAWDLYYHVFRRIS | |
| | KTS | |
| E2032I, | ILWHEMWHEGLIEASRLYFGERN | 61 |
| T2098L | VKGMFEVLEPLHAMMERGPQTLK | |
| mutant | | |
| | ETSFNQAYGRDLMEAQEWCRKYM | |
| | KSGNVKDLLQAWDLYYHVFRRIS | |
| | KTS | |
| E2032L, | ILWHEMWHEGLLEASRLYFGERN | 62 |
| T2098L | VKGMFEVLEPLHAMMERGPQTLK | |
| mutant | | |
| | ETSFNQAYGRDLMEAQEWCRKYM | |
| | KSGNVKDLLQAWDLYYHVFRRIS | |
| | KTS | |

[0471] Other suitable dimerization switches include a GyrB-GyrB based dimerization switch, a Gibberellin-based dimerization switch, a tag/binder dimerization switch, and a halo-tag/snap-tag dimerization switch. Following the guidance provided herein, such switches and relevant dimerization molecules will be apparent to one of ordinary skill.

[0472] Dimerization Molecule

[0473] Association between the switch domains is promoted by the dimerization molecule. In the presence of dimerization molecule interaction or association between switch domains allows for signal transduction between a polypeptide associated with, e.g., fused to, a first switch domain, and a polypeptide associated with, e.g., fused to, a second switch domain. In the presence of non-limiting levels of dimerization molecule signal transduction is increased by 1.1, 1.2, 1.3, 1.4, 1.5, 1.6, 1.7, 1.8, 1.9, 2, 5, 10, 50, 100 fold, e.g., as measured in a system described herein.

[0474] Rapamycin and rapamycin analogs (sometimes referred to as rapalogues), e.g., RAD001, can be used as dimerization molecules in a FKBP/FRB-based dimerization switch described herein. In an embodiment the dimerization molecule can be selected from rapamycin (sirolimus), RAD001 (everolimus), zotarolimus, temsirolimus, AP-23573 (ridaforolimus), biolimus and AP21967. Additional rapamycin analogs suitable for use with FKBP/FRB-based dimerization switches are further described in the section entitled “Combination Therapies”, or in the subsection entitled “Exemplary mTOR inhibitors.”

### Split CAR

[0475] In some embodiments, the CAR-expressing cell uses a split CAR. The split CAR approach is described in more detail in publications WO2014/055442 and WO2014/055657. Briefly, a split CAR system comprises a cell expressing a first CAR having a first antigen binding domain and a costimulatory domain (e.g., 41B), and the cell also expresses a second CAR having a second antigen binding domain and an intracellular signaling domain (e.g., CD3 zeta). When the cell encounters the first antigen, the costimulatory domain is activated, and the cell proliferates. When the cell encounters the second antigen, the intracellular signaling domain is activated and cell-killing activity begins. Thus, the CAR-expressing cell is only fully activated in the presence of both antigens.

### RNA Transfection

[0476] Disclosed herein are methods for producing an in vitro transcribed RNA CAR. The present invention also includes a CAR encoding RNA construct that can be directly transfected into a cell. A method for generating mRNA for use in transfection can involve in vitro transcription (IVT) of a template with specially designed primers, followed by polyA addition, to produce a construct containing 3′ and 5′ untranslated sequence (“UTR”), a 5′ cap and/or Internal Ribosome Entry Site (IRES), the nucleic acid to be expressed, and a polyA tail, typically 50-2000 bases in length (SEQ ID NO:32). RNA so produced can efficiently transfect different kinds of cells. In one aspect, the template includes sequences for the CAR.

[0477] In one aspect, a CAR of the present invention is encoded by a messenger RNA (mRNA). In one aspect, the mRNA encoding a CAR described herein is introduced into an immune effector cell, e.g., a T cell or a NK cell, for production of a CAR-expressing cell, e.g., a CART cell or a CAR NK cell.

[0478] In one embodiment, the in vitro transcribed RNA CAR can be introduced to a cell as a form of transient transfection. The RNA is produced by in vitro transcription using a polymerase chain reaction (PCR)-generated template. DNA of interest from any source can be directly converted by PCR into a template for in vitro mRNA synthesis using appropriate primers and RNA polymerase. The source of the DNA can be, for example, genomic DNA, plasmid DNA, phage DNA, cDNA, synthetic DNA sequence or any other appropriate source of DNA. The desired temple for in vitro transcription is a CAR described herein. For example, the template for the RNA CAR comprises an extracellular region comprising a single chain variable domain of an antibody to a tumor associated antigen described herein; a hinge region (e.g., a hinge region described herein), a transmembrane domain (e.g., a transmembrane domain described herein such as a transmembrane domain of CD8a); and a cytoplasmic region that includes an intracellular signaling domain, e.g., an intracellular signaling domain described herein, e.g., comprising the signaling domain of CD3-zeta and the signaling domain of 4-1BB.

[0479] In one embodiment, the DNA to be used for PCR contains an open reading frame. The DNA can be from a naturally occurring DNA sequence from the genome of an organism. In one embodiment, the nucleic acid can include some or all of the 5′ and/or 3′ untranslated regions (UTRs). The nucleic acid can include exons and introns. In one embodiment, the DNA to be used for PCR is a human nucleic acid sequence. In another embodiment, the DNA to be used for PCR is a human nucleic acid sequence including the 5′ and 3′ UTRs. The DNA can alternatively be an artificial DNA sequence that is not normally expressed in a naturally occurring organism. An exemplary artificial DNA sequence is one that contains portions of genes that are ligated together to form an open reading frame that encodes a fusion protein. The portions of DNA that are ligated together can be from a single organism or from more than one organism.

[0480] PCR is used to generate a template for in vitro transcription of mRNA which is used for transfection. Methods for performing PCR are well known in the art. Primers for use in PCR are designed to have regions that are substantially complementary to regions of the DNA to be used as a template for the PCR. “Substantially complementary,” as used herein, refers to sequences of nucleotides where a majority or all of the bases in the primer sequence are complementary, or one or more bases are non-complementary, or mismatched. Substantially complementary sequences are able to anneal or hybridize with the intended DNA target under annealing conditions used for PCR. The primers can be designed to be substantially complementary to any portion of the DNA template. For example, the primers can be designed to amplify the portion of a nucleic acid that is normally transcribed in cells (the open reading frame), including 5′ and 3′ UTRs. The primers can also be designed to amplify a portion of a nucleic acid that encodes a particular domain of interest. In one embodiment, the primers are designed to amplify the coding region of a human cDNA, including all or portions of the 5′ and 3′ UTRs. Primers useful for PCR can be generated by synthetic methods that are well known in the art. “Forward primers” are primers that contain a region of nucleotides that are substantially complementary to nucleotides on the DNA template that are upstream of the DNA sequence that is to be amplified. “Upstream” is used herein to refer to a location 5, to the DNA sequence to be amplified relative to the coding strand. “Reverse primers” are primers that contain a region of nucleotides that are substantially complementary to a double-stranded DNA template that are downstream of the DNA sequence that is to be amplified. “Downstream” is used herein to refer to a location 3′ to the DNA sequence to be amplified relative to the coding strand.

[0481] Any DNA polymerase useful for PCR can be used in the methods disclosed herein. The reagents and polymerase are commercially available from a number of sources.

[0482] Chemical structures with the ability to promote stability and/or translation efficiency may also be used. The RNA preferably has 5′ and 3′ UTRs. In one embodiment, the 5′ UTR is between one and 3000 nucleotides in length. The length of 5′ and 3′ UTR sequences to be added to the coding region can be altered by different methods, including, but not limited to, designing primers for PCR that anneal to different regions of the UTRs. Using this approach, one of ordinary skill in the art can modify the 5′ and 3′ UTR lengths required to achieve optimal translation efficiency following transfection of the transcribed RNA.

[0483] The 5′ and 3′ UTRs can be the naturally occurring, endogenous 5′ and 3′ UTRs for the nucleic acid of interest. Alternatively, UTR sequences that are not endogenous to the nucleic acid of interest can be added by incorporating the UTR sequences into the forward and reverse primers or by any other modifications of the template. The use of UTR sequences that are not endogenous to the nucleic acid of interest can be useful for modifying the stability and/or translation efficiency of the RNA. For example, it is known that AU-rich elements in 3′ UTR sequences can decrease the stability of mRNA. Therefore, 3′ UTRs can be selected or designed to increase the stability of the transcribed RNA based on properties of UTRs that are well known in the art.

[0484] In one embodiment, the 5′ UTR can contain the Kozak sequence of the endogenous nucleic acid. Alternatively, when a 5′ UTR that is not endogenous to the nucleic acid of interest is being added by PCR as described above, a consensus Kozak sequence can be redesigned by adding the 5′ UTR sequence. Kozak sequences can increase the efficiency of translation of some RNA transcripts, but does not appear to be required for all RNAs to enable efficient translation. The requirement for Kozak sequences for many mRNAs is known in the art. In other embodiments the 5′ UTR can be 5′UTR of an RNA virus whose RNA genome is stable in cells. In other embodiments various nucleotide analogues can be used in the 3′ or 5′ UTR to impede exonuclease degradation of the mRNA.

[0485] To enable synthesis of RNA from a DNA template without the need for gene cloning, a promoter of transcription should be attached to the DNA template upstream of the sequence to be transcribed. When a sequence that functions as a promoter for an RNA polymerase is added to the 5′ end of the forward primer, the RNA polymerase promoter becomes incorporated into the PCR product upstream of the open reading frame that is to be transcribed. In one preferred embodiment, the promoter is a T7 polymerase promoter, as described elsewhere herein. Other useful promoters include, but are not limited to, T3 and SP6 RNA polymerase promoters. Consensus nucleotide sequences for T7, T3 and SP6 promoters are known in the art.

[0486] In a preferred embodiment, the mRNA has both a cap on the 5′ end and a 3′ poly(A) tail which determine ribosome binding, initiation of translation and stability mRNA in the cell. On a circular DNA template, for instance, plasmid DNA, RNA polymerase produces a long concatameric product which is not suitable for expression in eukaryotic cells. The transcription of plasmid DNA linearized at the end of the 3′ UTR results in normal sized mRNA which is not effective in eukaryotic transfection even if it is polyadenylated after transcription.

[0487] On a linear DNA template, phage T7 RNA polymerase can extend the 3′ end of the transcript beyond the last base of the template (Schenborn and Mierendorf, Nuc Acids Res., 13:6223-36 (1985); Nacheva and Berzal-Herranz, Eur. J. Biochem., 270:1485-65 (2003).

[0488] The conventional method of integration of polyA/T stretches into a DNA template is molecular cloning. However polyA/T sequence integrated into plasmid DNA can cause plasmid instability, which is why plasmid DNA templates obtained from bacterial cells are often highly contaminated with deletions and other aberrations. This makes cloning procedures not only laborious and time consuming but often not reliable. That is why a method which allows construction of DNA templates with polyA/T 3′ stretch without cloning highly desirable.

[0489] The polyA/T segment of the transcriptional DNA template can be produced during PCR by using a reverse primer containing a polyT tail, such as 100T tail (SEQ ID NO: 35) (size can be 50-5000 T (SEQ ID NO: 36)), or after PCR by any other method, including, but not limited to, DNA ligation or in vitro recombination. Poly(A) tails also provide stability to RNAs and reduce their degradation. Generally, the length of a poly(A) tail positively correlates with the stability of the transcribed RNA. In one embodiment, the poly(A) tail is between 100 and 5000 adenosines (SEQ ID NO: 37).

[0490] Poly(A) tails of RNAs can be further extended following in vitro transcription with the use of a poly(A) polymerase, such as E. coli polyA polymerase (E-PAP). In one embodiment, increasing the length of a poly(A) tail from 100 nucleotides to between 300 and 400 nucleotides (SEQ ID NO: 38) results in about a two-fold increase in the translation efficiency of the RNA. Additionally, the attachment of different chemical groups to the 3′ end can increase mRNA stability. Such attachment can contain modified/artificial nucleotides, aptamers and other compounds. For example, ATP analogs can be incorporated into the poly(A) tail using poly(A) polymerase. ATP analogs can further increase the stability of the RNA.

[0491] 5′ caps on also provide stability to RNA molecules. In a preferred embodiment, RNAs produced by the methods disclosed herein include a 5′ cap. The 5′ cap is provided using techniques known in the art and described herein (Cougot, et al., Trends in Biochem. Sci., 29:436-444 (2001); Stepinski, et al., RNA, 7:1468-95 (2001); Elango, et al., Biochim. Biophys. Res. Commun., 330:958-966 (2005)).

[0492] The RNAs produced by the methods disclosed herein can also contain an internal ribosome entry site (IRES) sequence. The IRES sequence may be any viral, chromosomal or artificially designed sequence which initiates cap-independent ribosome binding to mRNA and facilitates the initiation of translation. Any solutes suitable for cell electroporation, which can contain factors facilitating cellular permeability and viability such as sugars, peptides, lipids, proteins, antioxidants, and surfactants can be included.

[0493] RNA can be introduced into target cells using any of a number of different methods, for instance, commercially available methods which include, but are not limited to, electroporation (Amaxa Nucleofector-II (Amaxa Biosystems, Cologne, Germany)), (ECM 830 (BTX) (Harvard Instruments, Boston, Mass.) or the Gene Pulser II (BioRad, Denver, Colo.), Multiporator (Eppendort, Hamburg Germany), cationic liposome mediated transfection using lipofection, polymer encapsulation, peptide mediated transfection, or biolistic particle delivery systems such as “gene guns” (see, for example, Nishikawa, et al. Hum Gene Ther., 12(8):861-70 (2001).

[0494] Non-Viral Delivery Methods

[0495] In some aspects, non-viral methods can be used to deliver a nucleic acid encoding a CAR described herein into a cell or tissue or a subject.

[0496] In some embodiments, the non-viral method includes the use of a transposon (also called a transposable element). In some embodiments, a transposon is a piece of DNA that can insert itself at a location in a genome, for example, a piece of DNA that is capable of self-replicating and inserting its copy into a genome, or a piece of DNA that can be spliced out of a longer nucleic acid and inserted into another place in a genome. For example, a transposon comprises a DNA sequence made up of inverted repeats flanking genes for transposition.

[0497] Exemplary methods of nucleic acid delivery using a transposon include a Sleeping Beauty transposon system (SBTS) and a piggyBac (PB) transposon system. See, e.g., Aronovich et al. Hum. Mol. Genet. 20.R1(2011):R14-20; Singh et al. Cancer Res. 15(2008):2961-2971; Huang et al. Mol. Ther. 16(2008):580-589; Grabundzija et al. Mol. Ther. 18(2010):1200-1209; Kebriaei et al. Blood. 122.21(2013):166; Williams. Molecular Therapy 16.9(2008):1515-16; Bell et al. Nat. Protoc. 2.12(2007):3153-65; and Ding et al. Cell. 122.3(2005):473-83, all of which are incorporated herein by reference.

[0498] The SBTS includes two components: 1) a transposon containing a transgene and 2) a source of transposase enzyme. The transposase can transpose the transposon from a carrier plasmid (or other donor DNA) to a target DNA, such as a host cell chromosome/genome. For example, the transposase binds to the carrier plasmid/donor DNA, cuts the transposon (including transgene(s)) out of the plasmid, and inserts it into the genome of the host cell. See, e.g., Aronovich et al. supra.

[0499] Exemplary transposons include a pT2-based transposon. See, e.g., Grabundzija et al. Nucleic Acids Res. 41.3(2013):1829-47; and Singh et al. Cancer Res. 68.8(2008): 2961-2971, all of which are incorporated herein by reference. Exemplary transposases include a Tc1/mariner-type transposase, e.g., the SB10 transposase or the SB 11 transposase (a hyperactive transposase which can be expressed, e.g., from a cytomegalovirus promoter). See, e.g., Aronovich et al.; Kebriaei et al.; and Grabundzija et al., all of which are incorporated herein by reference.

[0500] Use of the SBTS permits efficient integration and expression of a transgene, e.g., a nucleic acid encoding a CAR described herein. Provided herein are methods of generating a cell, e.g., T cell or NK cell, that stably expresses a CAR described herein, e.g., using a transposon system such as SBTS.

[0501] In accordance with methods described herein, in some embodiments, one or more nucleic acids, e.g., plasmids, containing the SBTS components are delivered to a cell (e.g., T or NK cell). For example, the nucleic acid(s) are delivered by standard methods of nucleic acid (e.g., plasmid DNA) delivery, e.g., methods described herein, e.g., electroporation, transfection, or lipofection. In some embodiments, the nucleic acid contains a transposon comprising a transgene, e.g., a nucleic acid encoding a CAR described herein. In some embodiments, the nucleic acid contains a transposon comprising a transgene (e.g., a nucleic acid encoding a CAR described herein) as well as a nucleic acid sequence encoding a transposase enzyme. In other embodiments, a system with two nucleic acids is provided, e.g., a dual-plasmid system, e.g., where a first plasmid contains a transposon comprising a transgene, and a second plasmid contains a nucleic acid sequence encoding a transposase enzyme. For example, the first and the second nucleic acids are co-delivered into a host cell.

[0502] In some embodiments, cells, e.g., T or NK cells, are generated that express a CAR described herein by using a combination of gene insertion using the SBTS and genetic editing using a nuclease (e.g., Zinc finger nucleases (ZFNs), Transcription Activator-Like Effector Nucleases (TALENs), the CRISPR/Cas system, or engineered meganuclease re-engineered homing endonucleases).

[0503] In some embodiments, use of a non-viral method of delivery permits reprogramming of cells, e.g., T or NK cells, and direct infusion of the cells into a subject. Advantages of non-viral vectors include but are not limited to the ease and relatively low cost of producing sufficient amounts required to meet a patient population, stability during storage, and lack of immunogenicity.

### Nucleic Acid Constructs Encoding a CAR

[0504] The present invention also provides nucleic acid molecules encoding one or more CAR constructs described herein. In one aspect, the nucleic acid molecule is provided as a messenger RNA transcript. In one aspect, the nucleic acid molecule is provided as a DNA construct.

[0505] Accordingly, in one aspect, the invention pertains to a nucleic acid molecule encoding a chimeric antigen receptor (CAR), wherein the CAR comprises an antigen binding domain that binds to a tumor antigen described herein, a transmembrane domain (e.g., a transmembrane domain described herein), and an intracellular signaling domain (e.g., an intracellular signaling domain described herein) comprising a stimulatory domain, e.g., a costimulatory signaling domain (e.g., a costimulatory signaling domain described herein) and/or a primary signaling domain (e.g., a primary signaling domain described herein, e.g., a zeta chain described herein). In one embodiment, the transmembrane domain is transmembrane domain of a protein selected from the group consisting of the alpha, beta or zeta chain of the T-cell receptor, CD28, CD3 epsilon, CD45, CD4, CD5, CD8, CD9, CD16, CD22, CD33, CD37, CD64, CD80, CD86, CD134, CD137 and CD154. In some embodiments, a transmembrane domain may include at least the transmembrane region(s) of, e.g., KIRDS2, OX40, CD2, CD27, LFA-1 (CD11a, CD18), ICOS (CD278), 4-1BB (CD137), GITR, CD40, BAFFR, HVEM (LIGHTR), SLAMF7, NKp80 (KLRF1), NKp44, NKp30, NKp46, CD160, CD19, IL2R beta, IL2R gamma, IL7R a, ITGA1, VLA1, CD49a, ITGA4, IA4, CD49D, ITGA6, VLA-6, CD49f, ITGAD, CD11d, ITGAE, CD103, ITGAL, CD11a, LFA-1, ITGAM, CD11b, ITGAX, CD11c, ITGB1, CD29, ITGB2, CD18, LFA-1, ITGB7, NKG2D, NKG2C, TNFR2, DNAM1 (CD226), SLAMF4 (CD244, 2B4), CD84, CD96 (Tactile), CEACAM1, CRTAM, Ly9 (CD229), CD160 (BY55), PSGL1, CD100 (SEMA4D), SLAMF6 (NTB-A, Ly108), SLAM (SLAMF1, CD150, IPO-3), BLAME (SLAMF8), SELPLG (CD162), LTBR, PAG/Cbp.

[0506] In one embodiment, the transmembrane domain comprises a sequence of SEQ ID NO: 12, or a sequence with 95-99% identity thereof. In one embodiment, the antigen binding domain is connected to the transmembrane domain by a hinge region, e.g., a hinge described herein. In one embodiment, the hinge region comprises SEQ ID NO:4 or SEQ ID NO:6 or SEQ ID NO:8 or SEQ ID NO:10, or a sequence with 95-99% identity thereof. In one embodiment, the isolated nucleic acid molecule further comprises a sequence encoding a costimulatory domain. In one embodiment, the costimulatory domain is a functional signaling domain of a protein selected from the group consisting of OX40, CD27, CD28, CDS, ICAM-1, LFA-1 (CD11a/CD18), ICOS (CD278), and 4-1BB (CD137). Further examples of such costimulatory molecules include CDS, ICAM-1, GITR, BAFFR, HVEM (LIGHTR), SLAMF7, NKp80 (KLRF1), NKp44, NKp30, NKp46, CD160, CD19, CD4, CD8alpha, CD8beta, IL2R beta, IL2R gamma, IL7R alpha, ITGA4, VLA1, CD49a, ITGA4, IA4, CD49D, ITGA6, VLA-6, CD49f, ITGAD, CD11d, ITGAE, CD103, ITGAL, CD11a, LFA-1, ITGAM, CD11b, ITGAX, CD11c, ITGB1, CD29, ITGB2, CD18, LFA-1, ITGB7, NKG2D, NKG2C, TNFR2, TRANCE/RANKL, DNAM1 (CD226), SLAMF4 (CD244, 2B4), CD84, CD96 (Tactile), CEACAM1, CRTAM, Ly9 (CD229), CD160 (BY55), PSGL1, CD100 (SEMA4D), CD69, SLAMF6 (NTB-A, Ly108), SLAM (SLAMF1, CD150, IPO-3), BLAME (SLAMF8), SELPLG (CD162), LTBR, LAT, GADS, SLP-76, and PAG/Cbp. In one embodiment, the costimulatory domain comprises a sequence of SEQ ID NO:16, or a sequence with 95-99% identity thereof. In one embodiment, the intracellular signaling domain comprises a functional signaling domain of 4-1BB and a functional signaling domain of CD3 zeta. In one embodiment, the intracellular signaling domain comprises the sequence of SEQ ID NO: 14 or SEQ ID NO:16, or a sequence with 95-99% identity thereof, and the sequence of SEQ ID NO: 18 or SEQ ID NO:20, or a sequence with 95-99% identity thereof, wherein the sequences comprising the intracellular signaling domain are expressed in the same frame and as a single polypeptide chain.

[0507] In another aspect, the invention pertains to an isolated nucleic acid molecule encoding a CAR construct comprising a leader sequence of SEQ ID NO: 2, a scFv domain as described herein, a hinge region of SEQ ID NO:4 or SEQ ID NO:6 or SEQ ID NO:8 or SEQ ID NO:10 (or a sequence with 95-99% identity thereof), a transmembrane domain having a sequence of SEQ ID NO: 12 (or a sequence with 95-99% identity thereof), a 4-1BB costimulatory domain having a sequence of SEQ ID NO:14 or a CD27 costimulatory domain having a sequence of SEQ ID NO:16 (or a sequence with 95-99% identity thereof), and a CD3 zeta stimulatory domain having a sequence of SEQ ID NO:18 or SEQ ID NO:20 (or a sequence with 95-99% identity thereof).

[0508] In another aspect, the invention pertains to a nucleic acid molecule encoding a chimeric antigen receptor (CAR) molecule that comprises an antigen binding domain, a transmembrane domain, and an intracellular signaling domain comprising a stimulatory domain, and wherein said antigen binding domain binds to a tumor antigen selected from a group consisting of: CD19, CD123, CD22, CD30, CD171, CS-1, CLL-1 (CLECL1), CD33, EGFRvIII, GD2, GD3, BCMA, Tn Ag, PSMA, ROR1, FLT3, FAP, TAG72, CD38, CD44v6, CEA, EPCAM, B7H3, KIT, IL-13Ra2, Mesothelin, IL-11Ra, PSCA, VEGFR2, LewisY, CD24, PDGFR-beta, SSEA-4, CD20, Folate receptor alpha, ERBB2 (Her2/neu), MUC1, EGFR, NCAM, Prostase, PRSS21, PAP, ELF2M, Ephrin B2, IGF-I receptor, CAIX, LMP2, gp100, ber-abl, tyrosinase, EphA2, Fucosyl GM1, sLe, GM3, TGS5, HMWMAA, o-acetyl-GD2, Folate receptor beta, TEM1/CD248, TEM7R, CLDN6, TSHR, GPRC5D, CXORF61, CD97, CD179a, ALK, Polysialic acid, PLAC1, GloboH, NY-BR-1, UPK2, HAVCR1, ADRB3, PANX3, GPR20, LY6K, OR51E2, TARP, WT1, NY-ESO-1, LAGE-1a, MAGE-A1, legumain, HPV E6, E7, MAGE A1, ETV6-AML, sperm protein 17, XAGE1, Tie 2, MAD-CT-1, MAD-CT-2, Fos-related antigen 1, p53, p53 mutant, prostein, survivin and telomerase, PCTA-1/Galectin 8, MelanA/MART1, Ras mutant, hTERT, sarcoma translocation breakpoints, ML-IAP, ERG (TMPRSS2 ETS fusion gene), NA17, PAX3, Androgen receptor, Cyclin B1, MYCN, RhoC, TRP-2, CYP1B1, BORIS, SART3, PAX5, OY-TES1, LCK, AKAP-4, SSX2, RAGE-1, human telomerase reverse transcriptase, RU1, RU2, intestinal carboxyl esterase, mut hsp70-2, CD79a, CD79b, CD72, LAIR1, FCAR, LILRA2, CD300LF, CLEC12A, BST2, EMR2, LY75, GPC3, FCRL5, and IGLL1.

[0509] In one embodiment, the encoded CAR molecule further comprises a sequence encoding a costimulatory domain. In one embodiment, the costimulatory domain is a functional signaling domain of a protein selected from the group consisting of OX40, CD27, CD28, CDS, ICAM-1, LFA-1 (CD11a/CD18) and 4-1BB (CD137). In one embodiment, the costimulatory domain comprises a sequence of SEQ ID NO: 14. In one embodiment, the transmembrane domain is a transmembrane domain of a protein selected from the group consisting of the alpha, beta or zeta chain of the T-cell receptor, CD28, CD3 epsilon, CD45, CD4, CD5, CD8, CD9, CD16, CD22, CD33, CD37, CD64, CD80, CD86, CD134, CD137 and CD154. In one embodiment, the transmembrane domain comprises a sequence of SEQ ID NO:12. In one embodiment, the intracellular signaling domain comprises a functional signaling domain of 4-1BB and a functional signaling domain of zeta. In one embodiment, the intracellular signaling domain comprises the sequence of SEQ ID NO: 14 and the sequence of SEQ ID NO: 18, wherein the sequences comprising the intracellular signaling domain are expressed in the same frame and as a single polypeptide chain. In one embodiment, the anti-a cancer associated antigen as described herein binding domain is connected to the transmembrane domain by a hinge region. In one embodiment, the hinge region comprises SEQ ID NO:4. In one embodiment, the hinge region comprises SEQ ID NO:6 or SEQ ID NO:8 or SEQ ID NO:10.

[0510] The nucleic acid sequences coding for the desired molecules can be obtained using recombinant methods known in the art, such as, for example by screening libraries from cells expressing the gene, by deriving the gene from a vector known to include the same, or by isolating directly from cells and tissues containing the same, using standard techniques. Alternatively, the gene of interest can be produced synthetically, rather than cloned.

[0511] The present invention also provides vectors in which a DNA of the present invention is inserted. Vectors derived from retroviruses such as the lentivirus are suitable tools to achieve long-term gene transfer since they allow long-term, stable integration of a transgene and its propagation in daughter cells. Lentiviral vectors have the added advantage over vectors derived from onco-retroviruses such as murine leukemia viruses in that they can transduce non-proliferating cells, such as hepatocytes. They also have the added advantage of low immunogenicity. A retroviral vector may also be, e.g., a gammaretroviral vector. A gammaretroviral vector may include, e.g., a promoter, a packaging signal (W), a primer binding site (PBS), one or more (e.g., two) long terminal repeats (LTR), and a transgene of interest, e.g., a gene encoding a CAR. A gammaretroviral vector may lack viral structural gens such as gag, pol, and env. Exemplary gammaretroviral vectors include Murine Leukemia Virus (MLV), Spleen-Focus Forming Virus (SFFV), and Myeloproliferative Sarcoma Virus (MPSV), and vectors derived therefrom. Other gammaretroviral vectors are described, e.g., in Tobias Maetzig et al., “Gammaretroviral Vectors: Biology, Technology and Application” Viruses. 2011 June; 3(6): 677-713.

[0512] In another embodiment, the vector comprising the nucleic acid encoding the desired CAR of the invention is an adenoviral vector (A5/35). In another embodiment, the expression of nucleic acids encoding CARs can be accomplished using of transposons such as sleeping beauty, crisper, CAS9, and zinc finger nucleases. See below June et al. 2009Nature Reviews Immunology 9.10: 704-716, is incorporated herein by reference.

[0513] In brief summary, the expression of natural or synthetic nucleic acids encoding CARs is typically achieved by operably linking a nucleic acid encoding the CAR polypeptide or portions thereof to a promoter, and incorporating the construct into an expression vector. The vectors can be suitable for replication and integration eukaryotes. Typical cloning vectors contain transcription and translation terminators, initiation sequences, and promoters useful for regulation of the expression of the desired nucleic acid sequence.

[0514] The expression constructs of the present invention may also be used for nucleic acid immunization and gene therapy, using standard gene delivery protocols. Methods for gene delivery are known in the art. See, e.g., U.S. Pat. Nos. 5,399,346, 5,580,859, 5,589,466, incorporated by reference herein in their entireties. In another embodiment, the invention provides a gene therapy vector.

[0515] The nucleic acid can be cloned into a number of types of vectors. For example, the nucleic acid can be cloned into a vector including, but not limited to a plasmid, a phagemid, a phage derivative, an animal virus, and a cosmid. Vectors of particular interest include expression vectors, replication vectors, probe generation vectors, and sequencing vectors.

[0516] Further, the expression vector may be provided to a cell in the form of a viral vector. Viral vector technology is well known in the art and is described, for example, in Sambrook et al., 2012, MOLECULAR CLONING: A LABORATORY MANUAL, volumes 1-4, Cold Spring Harbor Press, NY), and in other virology and molecular biology manuals. Viruses, which are useful as vectors include, but are not limited to, retroviruses, adenoviruses, adeno-associated viruses, herpes viruses, and lentiviruses. In general, a suitable vector contains an origin of replication functional in at least one organism, a promoter sequence, convenient restriction endonuclease sites, and one or more selectable markers, (e.g., WO 01/96584; WO 01/29058; and U.S. Pat. No. 6,326,193).

[0517] A number of viral based systems have been developed for gene transfer into mammalian cells. For example, retroviruses provide a convenient platform for gene delivery systems. A selected gene can be inserted into a vector and packaged in retroviral particles using techniques known in the art. The recombinant virus can then be isolated and delivered to cells of the subject either in vivo or ex vivo. A number of retroviral systems are known in the art. In some embodiments, adenovirus vectors are used. A number of adenovirus vectors are known in the art. In one embodiment, lentivirus vectors are used.

[0518] Additional promoter elements, e.g., enhancers, regulate the frequency of transcriptional initiation. Typically, these are located in the region 30-110 bp upstream of the start site, although a number of promoters have been shown to contain functional elements downstream of the start site as well. The spacing between promoter elements frequently is flexible, so that promoter function is preserved when elements are inverted or moved relative to one another. In the thymidine kinase (tk) promoter, the spacing between promoter elements can be increased to 50 bp apart before activity begins to decline. Depending on the promoter, it appears that individual elements can function either cooperatively or independently to activate transcription. Exemplary promoters include the CMV IE gene, EF-1a, ubiquitin C, or phosphoglycerokinase (PGK) promoters.

[0519] An example of a promoter that is capable of expressing a CAR encoding nucleic acid molecule in a mammalian T cell is the EF1a promoter. The native EF1a promoter drives expression of the alpha subunit of the elongation factor-1 complex, which is responsible for the enzymatic delivery of aminoacyl tRNAs to the ribosome. The EF1a promoter has been extensively used in mammalian expression plasmids and has been shown to be effective in driving CAR expression from nucleic acid molecules cloned into a lentiviral vector. See, e.g., Milone et al., Mol. Ther. 17(8): 1453-1464 (2009). In one aspect, the EF1a promoter comprises the sequence provided as SEQ ID NO: 1.

[0520] Another example of a promoter is the immediate early cytomegalovirus (CMV) promoter sequence. This promoter sequence is a strong constitutive promoter sequence capable of driving high levels of expression of any polynucleotide sequence operatively linked thereto. However, other constitutive promoter sequences may also be used, including, but not limited to the simian virus 40 (SV40) early promoter, mouse mammary tumor virus (MMTV), human immunodeficiency virus (HIV) long terminal repeat (LTR) promoter, MoMuLV promoter, an avian leukemia virus promoter, an Epstein-Barr virus immediate early promoter, a Rous sarcoma virus promoter, as well as human gene promoters such as, but not limited to, the actin promoter, the myosin promoter, the elongation factor-1α promoter, the hemoglobin promoter, and the creatine kinase promoter. Further, the invention should not be limited to the use of constitutive promoters. Inducible promoters are also contemplated as part of the invention. The use of an inducible promoter provides a molecular switch capable of turning on expression of the polynucleotide sequence which it is operatively linked when such expression is desired, or turning off the expression when expression is not desired. Examples of inducible promoters include, but are not limited to a metallothionine promoter, a glucocorticoid promoter, a progesterone promoter, and a tetracycline promoter.

[0521] A vector may also include, e.g., a signal sequence to facilitate secretion, a polyadenylation signal and transcription terminator (e.g., from Bovine Growth Hormone (BGH) gene), an element allowing episomal replication and replication in prokaryotes (e.g. SV40 origin and ColE1 or others known in the art) and/or elements to allow selection (e.g., ampicillin resistance gene and/or zeocin marker).

[0522] In order to assess the expression of a CAR polypeptide or portions thereof, the expression vector to be introduced into a cell can also contain either a selectable marker gene or a reporter gene or both to facilitate identification and selection of expressing cells from the population of cells sought to be transfected or infected through viral vectors. In other aspects, the selectable marker may be carried on a separate piece of DNA and used in a co-transfection procedure. Both selectable markers and reporter genes may be flanked with appropriate regulatory sequences to enable expression in the host cells. Useful selectable markers include, for example, antibiotic-resistance genes, such as neo and the like.

[0523] Reporter genes are used for identifying potentially transfected cells and for evaluating the functionality of regulatory sequences. In general, a reporter gene is a gene that is not present in or expressed by the recipient organism or tissue and that encodes a polypeptide whose expression is manifested by some easily detectable property, e.g., enzymatic activity. Expression of the reporter gene is assayed at a suitable time after the DNA has been introduced into the recipient cells. Suitable reporter genes may include genes encoding luciferase, beta-galactosidase, chloramphenicol acetyl transferase, secreted alkaline phosphatase, or the green fluorescent protein gene (e.g., Ui-Tei et al., 2000 FEBS Letters 479: 79-82). Suitable expression systems are well known and may be prepared using known techniques or obtained commercially. In general, the construct with the minimal 5′ flanking region showing the highest level of expression of reporter gene is identified as the promoter. Such promoter regions may be linked to a reporter gene and used to evaluate agents for the ability to modulate promoter-driven transcription.

[0524] Methods of introducing and expressing genes into a cell are known in the art. In the context of an expression vector, the vector can be readily introduced into a host cell, e.g., mammalian, bacterial, yeast, or insect cell by any method in the art. For example, the expression vector can be transferred into a host cell by physical, chemical, or biological means.

[0525] Physical methods for introducing a polynucleotide into a host cell include calcium phosphate precipitation, lipofection, particle bombardment, microinjection, electroporation, and the like. Methods for producing cells comprising vectors and/or exogenous nucleic acids are well-known in the art. See, for example, Sambrook et al., 2012, MOLECULAR CLONING: A LABORATORY MANUAL, volumes 1-4, Cold Spring Harbor Press, NY). A preferred method for the introduction of a polynucleotide into a host cell is calcium phosphate transfection

[0526] Biological methods for introducing a polynucleotide of interest into a host cell include the use of DNA and RNA vectors. Viral vectors, and especially retroviral vectors, have become the most widely used method for inserting genes into mammalian, e.g., human cells. Other viral vectors can be derived from lentivirus, poxviruses, herpes simplex virus I, adenoviruses and adeno-associated viruses, and the like. See, for example, U.S. Pat. Nos. 5,350,674 and 5,585,362.

[0527] Chemical means for introducing a polynucleotide into a host cell include colloidal dispersion systems, such as macromolecule complexes, nanocapsules, microspheres, beads, and lipid-based systems including oil-in-water emulsions, micelles, mixed micelles, and liposomes. An exemplary colloidal system for use as a delivery vehicle in vitro and in vivo is a liposome (e.g., an artificial membrane vesicle). Other methods of state-of-the-art targeted delivery of nucleic acids are available, such as delivery of polynucleotides with targeted nanoparticles or other suitable sub-micron sized delivery system.

[0528] In the case where a non-viral delivery system is utilized, an exemplary delivery vehicle is a liposome. The use of lipid formulations is contemplated for the introduction of the nucleic acids into a host cell (in vitro, ex vivo or in vivo). In another aspect, the nucleic acid may be associated with a lipid. The nucleic acid associated with a lipid may be encapsulated in the aqueous interior of a liposome, interspersed within the lipid bilayer of a liposome, attached to a liposome via a linking molecule that is associated with both the liposome and the oligonucleotide, entrapped in a liposome, complexed with a liposome, dispersed in a solution containing a lipid, mixed with a lipid, combined with a lipid, contained as a suspension in a lipid, contained or complexed with a micelle, or otherwise associated with a lipid. Lipid, lipid/DNA or lipid/expression vector associated compositions are not limited to any particular structure in solution. For example, they may be present in a bilayer structure, as micelles, or with a “collapsed” structure. They may also simply be interspersed in a solution, possibly forming aggregates that are not uniform in size or shape. Lipids are fatty substances which may be naturally occurring or synthetic lipids. For example, lipids include the fatty droplets that naturally occur in the cytoplasm as well as the class of compounds which contain long-chain aliphatic hydrocarbons and their derivatives, such as fatty acids, alcohols, amines, amino alcohols, and aldehydes.

[0529] Lipids suitable for use can be obtained from commercial sources. For example, dimyristyl phosphatidylcholine (“DMPC”) can be obtained from Sigma, St. Louis, Mo.; dicetyl phosphate (“DCP”) can be obtained from K & K Laboratories (Plainview, N.Y.); cholesterol (“Choi”) can be obtained from Calbiochem-Behring; dimyristyl phosphatidylglycerol (“DMPG”) and other lipids may be obtained from Avanti Polar Lipids, Inc. (Birmingham, Ala.). Stock solutions of lipids in chloroform or chloroform/methanol can be stored at about −20° C. Chloroform is used as the only solvent since it is more readily evaporated than methanol. “Liposome” is a generic term encompassing a variety of single and multilamellar lipid vehicles formed by the generation of enclosed lipid bilayers or aggregates. Liposomes can be characterized as having vesicular structures with a phospholipid bilayer membrane and an inner aqueous medium. Multilamellar liposomes have multiple lipid layers separated by aqueous medium. They form spontaneously when phospholipids are suspended in an excess of aqueous solution. The lipid components undergo self-rearrangement before the formation of closed structures and entrap water and dissolved solutes between the lipid bilayers (Ghosh et al., 1991 Glycobiology 5: 505-10). However, compositions that have different structures in solution than the normal vesicular structure are also encompassed. For example, the lipids may assume a micellar structure or merely exist as nonuniform aggregates of lipid molecules. Also contemplated are lipofectamine-nucleic acid complexes.

[0530] Regardless of the method used to introduce exogenous nucleic acids into a host cell or otherwise expose a cell to the inhibitor of the present invention, in order to confirm the presence of the recombinant DNA sequence in the host cell, a variety of assays may be performed. Such assays include, for example, “molecular biological” assays well known to those of skill in the art, such as Southern and Northern blotting, RT-PCR and PCR; “biochemical” assays, such as detecting the presence or absence of a particular peptide, e.g., by immunological means (ELISAs and Western blots) or by assays described herein to identify agents falling within the scope of the invention.

[0531] The present invention further provides a vector comprising a CAR encoding nucleic acid molecule. In one aspect, a CAR vector can be directly transduced into a cell, e.g., a T cell or a NK cell. In one aspect, the vector is a cloning or expression vector, e.g., a vector including, but not limited to, one or more plasmids (e.g., expression plasmids, cloning vectors, minicircles, minivectors, double minute chromosomes), retroviral and lentiviral vector constructs. In one aspect, the vector is capable of expressing the CAR construct in mammalian immune effector cells (e.g., T cells, NK cells). In one aspect, the mammalian T cell is a human T cell. In one aspect, the mammalian NK cell is a human NK cell.

[0532] Sources of Cells

[0533] Prior to expansion and genetic modification or other modification, a source of cells, e.g., T cells or natural killer (NK) cells, can be obtained from a subject. The term “subject” is intended to include living organisms in which an immune response can be elicited (e.g., mammals). Examples of subjects include humans, monkeys, chimpanzees, dogs, cats, mice, rats, and transgenic species thereof. T cells can be obtained from a number of sources, including peripheral blood mononuclear cells, bone marrow, lymph node tissue, cord blood, thymus tissue, tissue from a site of infection, ascites, pleural effusion, spleen tissue, and tumors.

[0534] In certain aspects of the present disclosure, immune effector cells, e.g., T cells, can be obtained from a unit of blood collected from a subject using any number of techniques known to the skilled artisan, such as Ficoll™ separation. In one preferred aspect, cells from the circulating blood of an individual are obtained by apheresis. The apheresis product typically contains lymphocytes, including T cells, monocytes, granulocytes, B cells, other nucleated white blood cells, red blood cells, and platelets. In one aspect, the cells collected by apheresis may be washed to remove the plasma fraction and, optionally, to place the cells in an appropriate buffer or media for subsequent processing steps. In one embodiment, the cells are washed with phosphate buffered saline (PBS). In an alternative embodiment, the wash solution lacks calcium and may lack magnesium or may lack many if not all divalent cations.

[0535] Initial activation steps in the absence of calcium can lead to magnified activation. As those of ordinary skill in the art would readily appreciate a washing step may be accomplished by methods known to those in the art, such as by using a semi-automated “flow-through” centrifuge (for example, the Cobe 2991 cell processor, the Baxter CytoMate, or the Haemonetics Cell Saver 5) according to the manufacturer's instructions. After washing, the cells may be resuspended in a variety of biocompatible buffers, such as, for example, Ca-free, Mg-free PBS, PlasmaLyte A, or other saline solution with or without buffer. Alternatively, the undesirable components of the apheresis sample may be removed and the cells directly resuspended in culture media.

[0536] It is recognized that the methods of the application can utilize culture media conditions comprising 5% or less, for example 2%, human AB serum, and employ known culture media conditions and compositions, for example those described in Smith et al., “Ex vivo expansion of human T cells for adoptive immunotherapy using the novel Xeno-free CTS Immune Cell Serum Replacement” Clinical & Translational Immunology (2015) 4, e31; doi:10.1038/cti.2014.31.

[0537] In one aspect, T cells are isolated from peripheral blood lymphocytes by lysing the red blood cells and depleting the monocytes, for example, by centrifugation through a PERCOLL™ gradient or by counterflow centrifugal elutriation.

[0538] The methods described herein can include, e.g., selection of a specific subpopulation of immune effector cells, e.g., T cells, that are a T regulatory cell-depleted population, CD25+ depleted cells, using, e.g., a negative selection technique, e.g., described herein. Preferably, the population of T regulatory depleted cells contains less than 30%, 25%, 20%, 15%, 10%, 5%, 4%, 3%, 2%, 1% of CD25+ cells.

[0539] In one embodiment, T regulatory cells, e.g., CD25+ T cells, are removed from the population using an anti-CD25 antibody, or fragment thereof, or a CD25-binding ligand, IL-2.

[0540] In one embodiment, the anti-CD25 antibody, or fragment thereof, or CD25-binding ligand is conjugated to a substrate, e.g., a bead, or is otherwise coated on a substrate, e.g., a bead. In one embodiment, the anti-CD25 antibody, or fragment thereof, is conjugated to a substrate as described herein.

[0541] In one embodiment, the T regulatory cells, e.g., CD25+ T cells, are removed from the population using CD25 depletion reagent from Miltenyi™. In one embodiment, the ratio of cells to CD25 depletion reagent is 1e7 cells to 20 uL, or 1e7 cells to 15 uL, or 1e7 cells to 10 uL, or 1e7 cells to 5 uL, or 1e7 cells to 2.5 uL, or 1e7 cells to 1.25 uL. In one embodiment, e.g., for T regulatory cells, e.g., CD25+ depletion, greater than 500 million cells/ml is used. In a further aspect, a concentration of cells of 600, 700, 800, or 900 million cells/ml is used.

[0542] In one embodiment, the population of immune effector cells to be depleted includes about 6×10⁹ CD25+ T cells. In other aspects, the population of immune effector cells to be depleted include about 1×10⁹ to 1×10¹⁰ CD25+ T cell, and any integer value in between. In one embodiment, the resulting population T regulatory depleted cells has 2×10⁹ T regulatory cells, e.g., CD25+ cells, or less (e.g., 1×10⁹, 5×10⁸, 1×10⁸, 5×10⁷, 1×10⁷, or less CD25+ cells).

[0543] In one embodiment, the T regulatory cells, e.g., CD25+ cells, are removed from the population using the CliniMAC system with a depletion tubing set, such as, e.g., tubing 162-01. In one embodiment, the CliniMAC system is run on a depletion setting such as, e.g., DEPLETION2.1.

[0544] Without wishing to be bound by a particular theory, decreasing the level of negative regulators of immune cells (e.g., decreasing the number of unwanted immune cells, e.g., TREG cells), in a subject prior to apheresis or during manufacturing of a CAR-expressing cell product can reduce the risk of subject relapse. For example, methods of depleting TREG cells are known in the art. Methods of decreasing TREG cells include, but are not limited to, cyclophosphamide, anti-GITR antibody (an anti-GITR antibody described herein), CD25-depletion, and combinations thereof.

[0545] In some embodiments, the manufacturing methods comprise reducing the number of (e.g., depleting) TREG cells prior to manufacturing of the CAR-expressing cell. For example, manufacturing methods comprise contacting the sample, e.g., the apheresis sample, with an anti-GITR antibody and/or an anti-CD25 antibody (or fragment thereof, or a CD25-binding ligand), e.g., to deplete TREG cells prior to manufacturing of the CAR-expressing cell (e.g., T cell, NK cell) product.

[0546] In an embodiment, a subject is pre-treated with one or more therapies that reduce TREG cells prior to collection of cells for CAR-expressing cell product manufacturing, thereby reducing the risk of subject relapse to CAR-expressing cell treatment. In an embodiment, methods of decreasing TREG cells include, but are not limited to, administration to the subject of one or more of cyclophosphamide, anti-GITR antibody, CD25-depletion, or a combination thereof. Administration of one or more of cyclophosphamide, anti-GITR antibody, CD25-depletion, or a combination thereof, can occur before, during or after an infusion of the CAR-expressing cell product.

[0547] In an embodiment, a subject is pre-treated with cyclophosphamide prior to collection of cells for CAR-expressing cell product manufacturing, thereby reducing the risk of subject relapse to CAR-expressing cell treatment. In an embodiment, a subject is pre-treated with an anti-GITR antibody prior to collection of cells for CAR-expressing cell product manufacturing, thereby reducing the risk of subject relapse to CAR-expressing cell treatment.

[0548] In one embodiment, the population of cells to be removed are neither the regulatory T cells or tumor cells, but cells that otherwise negatively affect the expansion and/or function of CART cells, e.g. cells expressing CD14, CD11b, CD33, CD15, or other markers expressed by potentially immune suppressive cells. In one embodiment, such cells are envisioned to be removed concurrently with regulatory T cells and/or tumor cells, or following said depletion, or in another order.

[0549] The methods described herein can include more than one selection step, e.g., more than one depletion step. Enrichment of a T cell population by negative selection can be accomplished, e.g., with a combination of antibodies directed to surface markers unique to the negatively selected cells. One method is cell sorting and/or selection via negative magnetic immunoadherence or flow cytometry that uses a cocktail of monoclonal antibodies directed to cell surface markers present on the cells negatively selected. For example, to enrich for CD4+ cells by negative selection, a monoclonal antibody cocktail can include antibodies to CD14, CD20, CD11b, CD16, HLA-DR, and CD8.

[0550] The methods described herein can further include removing cells from the population which express a tumor antigen, e.g., a tumor antigen that does not comprise CD25, e.g., CD19, CD30, CD38, CD123, CD20, CD14 or CD11b, to thereby provide a population of T regulatory depleted, e.g., CD25+ depleted, and tumor antigen depleted cells that are suitable for expression of a CAR, e.g., a CAR described herein. In one embodiment, tumor antigen expressing cells are removed simultaneously with the T regulatory, e.g., CD25+ cells. For example, an anti-CD25 antibody, or fragment thereof, and an anti-tumor antigen antibody, or fragment thereof, can be attached to the same substrate, e.g., bead, which can be used to remove the cells or an anti-CD25 antibody, or fragment thereof, or the anti-tumor antigen antibody, or fragment thereof, can be attached to separate beads, a mixture of which can be used to remove the cells. In other embodiments, the removal of T regulatory cells, e.g., CD25+ cells, and the removal of the tumor antigen expressing cells is sequential, and can occur, e.g., in either order.

[0551] Also provided are methods that include removing cells from the population which express a check point inhibitor, e.g., a check point inhibitor described herein, e.g., one or more of PD1+ cells, LAG3+ cells, and TIM3+ cells, to thereby provide a population of T regulatory depleted, e.g., CD25+ depleted cells, and check point inhibitor depleted cells, e.g., PD1+, LAG3+ and/or TIM3+ depleted cells. Exemplary check point inhibitors include B7-H1, B7-1, CD160, P1H, 2B4, PD1, TIM3, CEACAM (e.g., CEACAM-1, CEACAM-3 and/or CEACAM-5), LAG3, TIGIT, CTLA-4, BTLA and LAIR1. In one embodiment, check point inhibitor expressing cells are removed simultaneously with the T regulatory, e.g., CD25+ cells. For example, an anti-CD25 antibody, or fragment thereof, and an anti-check point inhibitor antibody, or fragment thereof, can be attached to the same bead which can be used to remove the cells, or an anti-CD25 antibody, or fragment thereof, and the anti-check point inhibitor antibody, or fragment there, can be attached to separate beads, a mixture of which can be used to remove the cells. In other embodiments, the removal of T regulatory cells, e.g., CD25+ cells, and the removal of the check point inhibitor expressing cells is sequential, and can occur, e.g., in either order.

[0552] Methods described herein can include a positive selection step. For example, T cells can isolated by incubation with anti-CD3/anti-CD28 (e.g., 3×28)-conjugated beads, such as DYNABEADS® M-450 CD3/CD28 T, for a time period sufficient for positive selection of the desired T cells. In one embodiment, the time period is about 30 minutes. In a further embodiment, the time period ranges from 30 minutes to 36 hours or longer and all integer values there between. In a further embodiment, the time period is at least 1, 2, 3, 4, 5, or 6 hours. In yet another embodiment, the time period is 10 to 24 hours, e.g., 24 hours. Longer incubation times may be used to isolate T cells in any situation where there are few T cells as compared to other cell types, such in isolating tumor infiltrating lymphocytes (TIL) from tumor tissue or from immunocompromised individuals. Further, use of longer incubation times can increase the efficiency of capture of CD8+ T cells. Thus, by simply shortening or lengthening the time T cells are allowed to bind to the CD3/CD28 beads and/or by increasing or decreasing the ratio of beads to T cells (as described further herein), subpopulations of T cells can be preferentially selected for or against at culture initiation or at other time points during the process. Additionally, by increasing or decreasing the ratio of anti-CD3 and/or anti-CD28 antibodies on the beads or other surface, subpopulations of T cells can be preferentially selected for or against at culture initiation or at other desired time points.

[0553] In one embodiment, a T cell population can be selected that expresses one or more of IFN-γ, TNFα, IL-17A, IL-2, IL-3, IL-4, GM-CSF, IL-10, IL-13, granzyme B, and perforin, or other appropriate molecules, e.g., other cytokines. Methods for screening for cell expression can be determined, e.g., by the methods described in PCT Publication No.: WO 2013/126712.

[0554] For isolation of a desired population of cells by positive or negative selection, the concentration of cells and surface (e.g., particles such as beads) can be varied. In certain aspects, it may be desirable to significantly decrease the volume in which beads and cells are mixed together (e.g., increase the concentration of cells), to ensure maximum contact of cells and beads. For example, in one aspect, a concentration of 10 billion cells/ml, 9 billion/ml, 8 billion/ml, 7 billion/ml, 6 billion/ml, or 5 billion/ml is used. In one aspect, a concentration of 1 billion cells/ml is used. In yet one aspect, a concentration of cells from 75, 80, 85, 90, 95, or 100 million cells/ml is used. In further aspects, concentrations of 125 or 150 million cells/ml can be used.

[0555] Using high concentrations can result in increased cell yield, cell activation, and cell expansion. Further, use of high cell concentrations allows more efficient capture of cells that may weakly express target antigens of interest, such as CD28-negative T cells, or from samples where there are many tumor cells present (e.g., leukemic blood, tumor tissue, etc.). Such populations of cells may have therapeutic value and would be desirable to obtain. For example, using high concentration of cells allows more efficient selection of CD8+ T cells that normally have weaker CD28 expression.

[0556] In a related aspect, it may be desirable to use lower concentrations of cells. By significantly diluting the mixture of T cells and surface (e.g., particles such as beads), interactions between the particles and cells is minimized. This selects for cells that express high amounts of desired antigens to be bound to the particles. For example, CD4+ T cells express higher levels of CD28 and are more efficiently captured than CD8+ T cells in dilute concentrations. In one aspect, the concentration of cells used is 5×10⁶/ml. In other aspects, the concentration used can be from about 1×10⁵/ml to 1×10⁶/ml, and any integer value in between.

[0557] In other aspects, the cells may be incubated on a rotator for varying lengths of time at varying speeds at either 2-10° C. or at room temperature.

[0558] T cells for stimulation can also be frozen after a washing step. Wishing not to be bound by theory, the freeze and subsequent thaw step provides a more uniform product by removing granulocytes and to some extent monocytes in the cell population. After the washing step that removes plasma and platelets, the cells may be suspended in a freezing solution. While many freezing solutions and parameters are known in the art and will be useful in this context, one method involves using PBS containing 20% DMSO and 8% human serum albumin, or culture media containing 10% Dextran 40 and 5% Dextrose, 20% Human Serum Albumin and 7.5% DMSO, or 31.25% Plasmalyte-A, 31.25% Dextrose 5%, 0.45% NaCl, 10% Dextran 40 and 5% Dextrose, 20% Human Serum Albumin, and 7.5% DMSO or other suitable cell freezing media containing for example, Hespan and PlasmaLyte A, the cells then are frozen to −80° C. at a rate of 1° per minute and stored in the vapor phase of a liquid nitrogen storage tank. Other methods of controlled freezing may be used as well as uncontrolled freezing immediately at −20° C. or in liquid nitrogen.

[0559] In certain aspects, cryopreserved cells are thawed and washed as described herein and allowed to rest for one hour at room temperature prior to activation using the methods of the present invention.

[0560] Also contemplated in the context of the invention is the collection of blood samples or apheresis product from a subject at a time period prior to when the expanded cells as described herein might be needed. As such, the source of the cells to be expanded can be collected at any time point necessary, and desired cells, such as T cells, isolated and frozen for later use in immune effector cell therapy for any number of diseases or conditions that would benefit from immune effector cell therapy, such as those described herein. In one aspect a blood sample or an apheresis is taken from a generally healthy subject. In certain aspects, a blood sample or an apheresis is taken from a generally healthy subject who is at risk of developing a disease, but who has not yet developed a disease, and the cells of interest are isolated and frozen for later use. In certain aspects, the T cells may be expanded, frozen, and used at a later time. In certain aspects, samples are collected from a patient shortly after diagnosis of a particular disease as described herein but prior to any treatments. In a further aspect, the cells are isolated from a blood sample or an apheresis from a subject prior to any number of relevant treatment modalities, including but not limited to treatment with agents such as natalizumab, efalizumab, antiviral agents, chemotherapy, radiation, immunosuppressive agents, such as cyclosporin, azathioprine, methotrexate, mycophenolate, and FK506, antibodies, or other immunoablative agents such as CAMPATH, anti-CD3 antibodies, cytoxan, fludarabine, cyclosporin, FK506, rapamycin, mycophenolic acid, steroids, FR901228, and irradiation.

[0561] In a further aspect of the present invention, T cells are obtained from a patient directly following treatment that leaves the subject with functional T cells. In this regard, it has been observed that following certain cancer treatments, in particular treatments with drugs that damage the immune system, shortly after treatment during the period when patients would normally be recovering from the treatment, the quality of T cells obtained may be optimal or improved for their ability to expand ex vivo. Likewise, following ex vivo manipulation using the methods described herein, these cells may be in a preferred state for enhanced engraftment and in vivo expansion. Thus, it is contemplated within the context of the present invention to collect blood cells, including T cells, dendritic cells, or other cells of the hematopoietic lineage, during this recovery phase. Further, in certain aspects, mobilization (for example, mobilization with GM-CSF) and conditioning regimens can be used to create a condition in a subject wherein repopulation, recirculation, regeneration, and/or expansion of particular cell types is favored, especially during a defined window of time following therapy. Illustrative cell types include T cells, B cells, dendritic cells, and other cells of the immune system.

[0562] In one embodiment, the immune effector cells expressing a CAR molecule, e.g., a CAR molecule described herein, are obtained from a subject that has received a low, immune enhancing dose of an mTOR inhibitor. In an embodiment, the population of immune effector cells, e.g., T cells, to be engineered to express a CAR, are harvested after a sufficient time, or after sufficient dosing of the low, immune enhancing, dose of an mTOR inhibitor, such that the level of PD1 negative immune effector cells, e.g., T cells, or the ratio of PD1 negative immune effector cells, e.g., T cells/PD1 positive immune effector cells, e.g., T cells, in the subject or harvested from the subject has been, at least transiently, increased.

[0563] In other embodiments, population of immune effector cells, e.g., T cells, which have, or will be engineered to express a CAR, can be treated ex vivo by contact with an amount of an mTOR inhibitor that increases the number of PD1 negative immune effector cells, e.g., T cells or increases the ratio of PD1 negative immune effector cells, e.g., T cells/PD1 positive immune effector cells, e.g., T cells.

[0564] In one embodiment, a T cell population is diaglycerol kinase (DGK)-deficient. DGK-deficient cells include cells that do not express DGK RNA or protein, or have reduced or inhibited DGK activity. DGK-deficient cells can be generated by genetic approaches, e.g., administering RNA-interfering agents, e.g., siRNA, shRNA, miRNA, to reduce or prevent DGK expression. Alternatively, DGK-deficient cells can be generated by treatment with DGK inhibitors described herein.

[0565] In one embodiment, a T cell population is Ikaros-deficient. Ikaros-deficient cells include cells that do not express Ikaros RNA or protein, or have reduced or inhibited Ikaros activity, Ikaros-deficient cells can be generated by genetic approaches, e.g., administering RNA-interfering agents, e.g., siRNA, shRNA, miRNA, to reduce or prevent Ikaros expression. Alternatively, Ikaros-deficient cells can be generated by treatment with Ikaros inhibitors, e.g., lenalidomide.

[0566] In embodiments, a T cell population is DGK-deficient and Ikaros-deficient, e.g., does not express DGK and Ikaros, or has reduced or inhibited DGK and Ikaros activity. Such DGK and Ikaros-deficient cells can be generated by any of the methods described herein.

[0567] In an embodiment, the NK cells are obtained from the subject. In another embodiment, the NK cells are an NK cell line, e.g., NK-92 cell line (Conkwest).

### Allogeneic CAR

[0568] In embodiments described herein, the immune effector cell can be an allogeneic immune effector cell, e.g., T cell or NK cell. For example, the cell can be an allogeneic T cell, e.g., an allogeneic T cell lacking expression of a functional T cell receptor (TCR) and/or human leukocyte antigen (HLA), e.g., HLA class I and/or HLA class II.

[0569] A T cell lacking a functional TCR can be, e.g., engineered such that it does not express any functional TCR on its surface, engineered such that it does not express one or more subunits that comprise a functional TCR or engineered such that it produces very little functional TCR on its surface. Alternatively, the T cell can express a substantially impaired TCR, e.g., by expression of mutated or truncated forms of one or more of the subunits of the TCR. The term “substantially impaired TCR” means that this TCR will not elicit an adverse immune reaction in a host.

[0570] A T cell described herein can be, e.g., engineered such that it does not express a functional HLA on its surface. For example, a T cell described herein, can be engineered such that cell surface expression HLA, e.g., HLA class 1 and/or HLA class II, is downregulated.

[0571] In some embodiments, the T cell can lack a functional TCR and a functional HLA, e.g., HLA class I and/or HLA class II.

[0572] Modified T cells that lack expression of a functional TCR and/or HLA can be obtained by any suitable means, including a knock out or knock down of one or more subunit of TCR or HLA. For example, the T cell can include a knock down of TCR and/or HLA using siRNA, shRNA, clustered regularly interspaced short palindromic repeats (CRISPR) transcription-activator like effector nuclease (TALEN), or zinc finger endonuclease (ZFN).

[0573] In some embodiments, the allogeneic cell can be a cell which does not express or expresses at low levels an inhibitory molecule, e.g. by any method described herein. For example, the cell can be a cell that does not express or expresses at low levels an inhibitory molecule, e.g., that can decrease the ability of a CAR-expressing cell to mount an immune effector response. Examples of inhibitory molecules include PD1, PD-L1, CTLA4, TIM3, CEACAM (e.g., CEACAM-1, CEACAM-3 and/or CEACAM-5), LAG3, VISTA, BTLA, TIGIT, LAIR1, CD160, 2B4 and TGF beta. Inhibition of an inhibitory molecule, e.g., by inhibition at the DNA, RNA or protein level, can optimize a CAR-expressing cell performance. In embodiments, an inhibitory nucleic acid, e.g., an inhibitory nucleic acid, e.g., a dsRNA, e.g., an siRNA or shRNA, a clustered regularly interspaced short palindromic repeats (CRISPR), a transcription-activator like effector nuclease (TALEN), or a zinc finger endonuclease (ZFN), e.g., as described herein, can be used.

[0574] siRNA and shRNA to Inhibit TCR or HLA

[0575] In some embodiments, TCR expression and/or HLA expression can be inhibited using siRNA or shRNA that targets a nucleic acid encoding a TCR and/or HLA in a T cell.

[0576] Expression of siRNA and shRNAs in T cells can be achieved using any conventional expression system, e.g., such as a lentiviral expression system.

[0577] Exemplary shRNAs that downregulate expression of components of the TCR are described, e.g., in US Publication No.: 2012/0321667. Exemplary siRNA and shRNA that downregulate expression of HLA class I and/or HLA class II genes are described, e.g., in U.S. publication No.: US 2007/0036773.

[0578] CRISPR to Inhibit TCR or HLA

[0579] “CRISPR” or “CRISPR to TCR and/or HLA” or “CRISPR to inhibit TCR and/or HLA” as used herein refers to a set of clustered regularly interspaced short palindromic repeats, or a system comprising such a set of repeats. “Cas”, as used herein, refers to a CRISPR-associated protein. A “CRISPR/Cas” system refers to a system derived from CRISPR and Cas which can be used to silence or mutate a TCR and/or HLA gene.

[0580] Naturally-occurring CRISPR/Cas systems are found in approximately 40% of sequenced eubacteria genomes and 90% of sequenced archaea. Grissa et al. (2007) BMC Bioinformatics 8: 172. This system is a type of prokaryotic immune system that confers resistance to foreign genetic elements such as plasmids and phages and provides a form of acquired immunity. Barrangou et al. (2007) Science 315: 1709-1712; Marragini et al. (2008) Science 322: 1843-1845.

[0581] The CRISPR/Cas system has been modified for use in gene editing (silencing, enhancing or changing specific genes) in eukaryotes such as mice or primates. Wiedenheft et al. (2012) Nature 482: 331-8. This is accomplished by introducing into the eukaryotic cell a plasmid containing a specifically designed CRISPR and one or more appropriate Cas.

[0582] The CRISPR sequence, sometimes called a CRISPR locus, comprises alternating repeats and spacers. In a naturally-occurring CRISPR, the spacers usually comprise sequences foreign to the bacterium such as a plasmid or phage sequence; in the TCR and/or HLA CRISPR/Cas system, the spacers are derived from the TCR or HLA gene sequence.

[0583] RNA from the CRISPR locus is constitutively expressed and processed by Cas proteins into small RNAs. These comprise a spacer flanked by a repeat sequence. The RNAs guide other Cas proteins to silence exogenous genetic elements at the RNA or DNA level. Horvath et al. (2010) Science 327: 167-170; Makarova et al. (2006) Biology Direct 1: 7. The spacers thus serve as templates for RNA molecules, analogously to siRNAs. Pennisi (2013) Science 341: 833-836.

[0584] As these naturally occur in many different types of bacteria, the exact arrangements of the CRISPR and structure, function and number of Cas genes and their product differ somewhat from species to species. Haft et al. (2005) PLoS Comput. Biol. 1: e60; Kunin et al. (2007) Genome Biol. 8: R61; Mojica et al. (2005) J. Mol. Evol. 60: 174-182; Bolotin et al. (2005) Microbiol. 151: 2551-2561; Pourcel et al. (2005) Microbiol. 151: 653-663; and Stern et al. (2010) Trends. Genet. 28: 335-340. For example, the Cse (Cas subtype, E. coli) proteins (e.g., CasA) form a functional complex, Cascade, that processes CRISPR RNA transcripts into spacer-repeat units that Cascade retains. Brouns et al. (2008) Science 321: 960-964. In other prokaryotes, Cas6 processes the CRISPR transcript. The CRISPR-based phage inactivation in E. coli requires Cascade and Cas3, but not Cas1 or Cas2. The Cmr (Cas RAMP module) proteins in Pyrococcus furiosus and other prokaryotes form a functional complex with small CRISPR RNAs that recognizes and cleaves complementary target RNAs. A simpler CRISPR system relies on the protein Cas9, which is a nuclease with two active cutting sites, one for each strand of the double helix. Combining Cas9 and modified CRISPR locus RNA can be used in a system for gene editing. Pennisi (2013) Science 341: 833-836.

[0585] The CRISPR/Cas system can thus be used to edit a TCR and/or HLA gene (adding or deleting a basepair), or introducing a premature stop which thus decreases expression of a TCR and/or HLA. The CRISPR/Cas system can alternatively be used like RNA interference, turning off TCR and/or HLA gene in a reversible fashion. In a mammalian cell, for example, the RNA can guide the Cas protein to a TCR and/or HLA promoter, sterically blocking RNA polymerases.

[0586] Artificial CRISPR/Cas systems can be generated which inhibit TCR and/or HLA, using technology known in the art, e.g., that described in U.S. Publication No. 20140068797, and Cong (2013) Science 339: 819-823. Other artificial CRISPR/Cas systems that are known in the art may also be generated which inhibit TCR and/or HLA, e.g., that described in Tsai (2014) Nature Biotechnol., 32:6 569-576, U.S. Pat. Nos. 8,871,445; 8,865,406; 8,795,965; 8,771,945; and 8,697,359.

[0587] TALEN to Inhibit TCR and/or HLA

[0588] “TALEN” or “TALEN to HLA and/or TCR” or “TALEN to inhibit HLA and/or TCR” refers to a transcription activator-like effector nuclease, an artificial nuclease which can be used to edit the HLA and/or TCR gene.

[0589] TALENs are produced artificially by fusing a TAL effector DNA binding domain to a DNA cleavage domain. Transcription activator-like effects (TALEs) can be engineered to bind any desired DNA sequence, including a portion of the HLA or TCR gene. By combining an engineered TALE with a DNA cleavage domain, a restriction enzyme can be produced which is specific to any desired DNA sequence, including a HLA or TCR sequence. These can then be introduced into a cell, wherein they can be used for genome editing. Boch (2011) Nature Biotech. 29: 135-6; and Boch et al. (2009) Science 326: 1509-12; Moscou et al. (2009) Science 326: 3501.

[0590] TALEs are proteins secreted by Xanthomonas bacteria. The DNA binding domain contains a repeated, highly conserved 33-34 amino acid sequence, with the exception of the 12th and 13th amino acids. These two positions are highly variable, showing a strong correlation with specific nucleotide recognition. They can thus be engineered to bind to a desired DNA sequence.

[0591] To produce a TALEN, a TALE protein is fused to a nuclease (N), which is a wild-type or mutated FokI endonuclease. Several mutations to FokI have been made for its use in TALENs; these, for example, improve cleavage specificity or activity. Cermak et al. (2011) Nucl. Acids Res. 39: e82; Miller et al. (2011) Nature Biotech. 29: 143-8; Hockemeyer et al. (2011) Nature Biotech. 29: 731-734; Wood et al. (2011) Science 333: 307; Doyon et al. (2010) Nature Methods 8: 74-79; Szczepek et al. (2007) Nature Biotech. 25: 786-793; and Guo et al. (2010) J. Mol. Biol. 200: 96.

[0592] The FokI domain functions as a dimer, requiring two constructs with unique DNA binding domains for sites in the target genome with proper orientation and spacing. Both the number of amino acid residues between the TALE DNA binding domain and the FokI cleavage domain and the number of bases between the two individual TALEN binding sites appear to be important parameters for achieving high levels of activity. Miller et al. (2011) Nature Biotech. 29: 143-8.

[0593] A HLA or TCR TALEN can be used inside a cell to produce a double-stranded break (DSB). A mutation can be introduced at the break site if the repair mechanisms improperly repair the break via non-homologous end joining. For example, improper repair may introduce a frame shift mutation. Alternatively, foreign DNA can be introduced into the cell along with the TALEN; depending on the sequences of the foreign DNA and chromosomal sequence, this process can be used to correct a defect in the HLA or TCR gene or introduce such a defect into a wt HLA or TCR gene, thus decreasing expression of HLA or TCR.

[0594] TALENs specific to sequences in HLA or TCR can be constructed using any method known in the art, including various schemes using modular components. Zhang et al. (2011) Nature Biotech. 29: 149-53; Geibler et al. (2011) PLoS ONE 6: e19509.

[0595] Zinc Finger Nuclease to Inhibit HLA and/or TCR

[0596] “ZFN” or “Zinc Finger Nuclease” or “ZFN to HLA and/or TCR” or “ZFN to inhibit HLA and/or TCR” refer to a zinc finger nuclease, an artificial nuclease which can be used to edit the HLA and/or TCR gene.

[0597] Like a TALEN, a ZFN comprises a FokI nuclease domain (or derivative thereof) fused to a DNA-binding domain. In the case of a ZFN, the DNA-binding domain comprises one or more zinc fingers. Carroll et al. (2011) Genetics Society of America 188: 773-782; and Kim et al. (1996) Proc. Natl. Acad. Sci. USA 93: 1156-1160.

[0598] A zinc finger is a small protein structural motif stabilized by one or more zinc ions. A zinc finger can comprise, for example, Cys2His2, and can recognize an approximately 3-bp sequence. Various zinc fingers of known specificity can be combined to produce multi-finger polypeptides which recognize about 6, 9, 12, 15 or 18-bp sequences. Various selection and modular assembly techniques are available to generate zinc fingers (and combinations thereof) recognizing specific sequences, including phage display, yeast one-hybrid systems, bacterial one-hybrid and two-hybrid systems, and mammalian cells.

[0599] Like a TALEN, a ZFN must dimerize to cleave DNA. Thus, a pair of ZFNs are required to target non-palindromic DNA sites. The two individual ZFNs must bind opposite strands of the DNA with their nucleases properly spaced apart. Bitinaite et al. (1998) Proc. Natl. Acad. Sci. USA 95: 10570-5.

[0600] Also like a TALEN, a ZFN can create a double-stranded break in the DNA, which can create a frame-shift mutation if improperly repaired, leading to a decrease in the expression and amount of HLA and/or TCR in a cell. ZFNs can also be used with homologous recombination to mutate in the HLA or TCR gene.

[0601] ZFNs specific to sequences in HLA AND/OR TCR can be constructed using any method known in the art. See, e.g., Provasi (2011) Nature Med. 18: 807-815; Torikai (2013) Blood 122: 1341-1349; Cathomen et al. (2008) Mol. Ther. 16: 1200-7; Guo et al. (2010) J. Mol. Biol. 400: 96; U.S. Patent Publication 2011/0158957; and U.S. Patent Publication 2012/0060230.

[0602] Telomerase Expression

[0603] While not wishing to be bound by any particular theory, in some embodiments, a therapeutic T cell has short term persistence in a patient, due to shortened telomeres in the T cell; accordingly, transfection with a telomerase gene can lengthen the telomeres of the T cell and improve persistence of the T cell in the patient. See Carl June, “Adoptive T cell therapy for cancer in the clinic”, Journal of Clinical Investigation, 117:1466-1476 (2007). Thus, in an embodiment, an immune effector cell, e.g., a T cell, ectopically expresses a telomerase subunit, e.g., the catalytic subunit of telomerase, e.g., TERT, e.g., hTERT. In some aspects, this disclosure provides a method of producing a CAR-expressing cell, comprising contacting a cell with a nucleic acid encoding a telomerase subunit, e.g., the catalytic subunit of telomerase, e.g., TERT, e.g., hTERT. The cell may be contacted with the nucleic acid before, simultaneous with, or after being contacted with a construct encoding a CAR.

[0604] In one aspect, the disclosure features a method of making a population of immune effector cells (e.g., T cells, NK cells). In an embodiment, the method comprises: providing a population of immune effector cells (e.g., T cells or NK cells), contacting the population of immune effector cells with a nucleic acid encoding a CAR; and contacting the population of immune effector cells with a nucleic acid encoding a telomerase subunit, e.g., hTERT, under conditions that allow for CAR and telomerase expression.

[0605] In an embodiment, the nucleic acid encoding the telomerase subunit is DNA. In an embodiment, the nucleic acid encoding the telomerase subunit comprises a promoter capable of driving expression of the telomerase subunit.

[0606] In an embodiment, hTERT has the amino acid sequence of GenBank Protein ID AAC51724.1 (Meyerson et al., “hEST2, the Putative Human Telomerase Catalytic Subunit Gene, Is Up-Regulated in Tumor Cells and during Immortalization” Cell Volume 90, Issue 4, 22 Aug. 1997, Pages 785-795) as follows:

(SEQ ID NO: 63)
[sequence omitted]

[0607] In an embodiment, the hTERT has a sequence at least 80%, 85%, 90%, 95%, 96\hat{ }, 97%, 98%, or 99% identical to the sequence of SEQ ID NO: 63. In an embodiment, the hTERT has a sequence of SEQ ID NO: 63. In an embodiment, the hTERT comprises a deletion (e.g., of no more than 5, 10, 15, 20, or 30 amino acids) at the N-terminus, the C-terminus, or both. In an embodiment, the hTERT comprises a transgenic amino acid sequence (e.g., of no more than 5, 10, 15, 20, or 30 amino acids) at the N-terminus, the C-terminus, or both.

[0608] In an embodiment, the hTERT is encoded by the nucleic acid sequence of GenBank Accession No. AF018167 (Meyerson et al., “hEST2, the Putative Human Telomerase Catalytic Subunit Gene, Is Up-Regulated in Tumor Cells and during Immortalization” Cell Volume 90, Issue 4, 22 Aug. 1997, Pages 785-795):

| (SEQ ID NO: 64) | |
|---|---|
| 1 | caggcagcgt ggtcctgctg cgcacgtggg aagccctggc cccggccacc cccgcgatgc |
| 61 | cgcgcgctcc ccgctgccga gccgtgcgct ccctgctgcg cagccactac cgcgaggtgc |
| 121 | tgccgctggc cacgttcgtg cggcgcctgg ggccccaggg ctggcggctg gtgcagcgcg |
| 181 | gggacccggc ggctttccgc gcgctggtgg cccagtgcct ggtgtgcgtg ccctgggacg |
| 241 | cacggccgcc ccccgccgcc ccctccttcc gccaggtgtc ctgcctgaag gagctggtgg |
| 301 | cccgagtgct gcagaggctg tgcgagcgcg gcgcgaagaa cgtgctggcc ttcggcttcg |
| 361 | cgctgctgga cggggcccgc gggggccccc ccgaggcctt caccaccagc gtgcgcagct |
| 421 | acctgcccaa cacggtgacc gacgcactgc gggggagcgg ggcgtggggg ctgctgttgc |
| 481 | gccgcgtggg cgacgacgtg ctggttcacc tgctggcacg ctgcgcgctc tttgtgctgg |
| 541 | tggctcccag ctgcgcctac caggtgtgcg ggccgccgct gtaccagctc ggcgctgcca |
| 601 | ctcaggcccg gcccccgcca cacgctagtg gaccccgaag gcgtctggga tgcgaacggg |
| 661 | cctggaacca tagcgtcagg gaggccgggg tccccctggg cctgccagcc ccgggtgcga |
| 721 | ggaggcgcgg gggcagtgcc agccgaagtc tgccgttgcc caagaggccc aggcgtggcg |
| 781 | ctgcccctga gccggagcgg acgcccgttg ggcaggggtc ctgggcccac ccgggcagga |
| 841 | cgcgtggacc gagtgaccgt ggtttctgtg tggtgtcacc tgccagaccc gccgaagaag |
| 901 | ccacctcttt ggagggtgcg ctctctggca cgcgccactc ccacccatcc gtgggccgcc |
| 961 | agcaccacgc gggcccccca tccacatcgc ggccaccacg tccctgggac acgccttgtc |
| 1021 | ccccggtgta cgccgagacc aagcacttcc tctactcctc aggcgacaag gagcagctgc |
| 1081 | ggccctcctt cctactcagc tctctgaggc ccagcctgac tggcgctcgg aggctcgtgg |
| 1141 | agaccatctt tctgggttcc aggccctgga tgccagggac tccccgcagg ttgccccgcc |
| 1201 | tgccccagcg ctactggcaa atgcggcccc tgtttctgga gctgcttggg aaccacgcgc |
| 1261 | agtgccccta cggggtgctc ctcaagacgc actgcccgct gcgagctgcg gtcaccccag |
| 1321 | cagccggtgt ctgtgcccgg gagaagcccc agggctctgt ggcggccccc gaggaggagg |
| 1381 | acacagaccc ccgtcgcctg gtgcagctgc tccgccagca cagcagcccc tggcaggtgt |
| 1441 | acggcttcgt gcgggcctgc ctgcgccggc tggtgccccc aggcctctgg ggctccaggc |
| 1501 | acaacgaacg ccgcttcctc aggaacacca agaagttcat ctccctgggg aagcatgcca |
| 1561 | agctctcgct gcaggagctg acgtggaaga tgagcgtgcg gggctgcgct tggctgcgca |
| 1621 | ggagcccagg ggttggctgt gttccggccg cagagcaccg tctgcgtgag gagatcctgg |
| 1681 | ccaagttcct gcactggctg atgagtgtgt acgtcgtcga gctgctcagg tctttctttt |
| 1741 | atgtcacgga gaccacgttt caaaagaaca ggctcttttt ctaccggaag agtgtctgga |
| 1801 | gcaagttgca aagcattgga atcagacagc acttgaagag ggtgcagctg cgggagctgt |
| 1861 | cggaagcaga ggtcaggcag catcgggaag ccaggcccgc cctgctgacg tccagactcc |
| 1921 | gcttcatccc caagcctgac gggctgcggc cgattgtgaa catggactac gtcgtgggag |
| 1981 | ccagaacgtt ccgcagagaa aagagggccg agcgtctcac ctcgagggtg aaggcactgt |
| 2041 | tcagcgtgct caactacgag cgggcgcggc gccccggcct cctgggcgcc tctgtgctgg |
| 2101 | gcctggacga tatccacagg gcctggcgca ccttcgtgct gcgtgtgcgg gcccaggacc |
| 2161 | cgccgcctga gctgtacttt gtcaaggtgg atgtgacggg cgcgtacgac accatccccc |
| 2221 | aggacaggct cacggaggtc atcgccagca tcatcaaacc ccagaacacg tactgcgtgc |
| 2281 | gtcggtatgc cgtggtccag aaggccgccc atgggcacgt ccgcaaggcc ttcaagagcc |
| 2341 | acgtctctac cttgacagac ctccagccgt acatgcgaca gttcgtggct cacctgcagg |
| 2401 | agaccagccc gctgagggat gccgtcgtca tcgagcagag ctcctccctg aatgaggcca |
| 2461 | gcagtggcct cttcgacgtc ttcctacgct tcatgtgcca ccacgccgtg cgcatcaggg |
| 2521 | gcaagtccta cgtccagtgc caggggatcc cgcagggctc catcctctcc acgctgctct |
| 2581 | gcagcctgtg ctacggcgac atggagaaca agctgtttgc ggggattcgg cgggacgggc |
| 2641 | tgctcctgcg tttggtggat gatttcttgt tggtgacacc tcacctcacc cacgcgaaaa |
| 2701 | ccttcctcag gaccctggtc cgaggtgtcc ctgagtatgg ctgcgtggtg aacttgcgga |
| 2761 | agacagtggt gaacttccct gtagaagacg aggccctggg tggcacggct tttgttcaga |
| 2821 | tgccggccca cggcctattc ccctggtgcg gcctgctgct ggatacccgg accctggagg |
| 2881 | tgcagagcga ctactccagc tatgcccgga cctccatcag agccagtctc accttcaacc |
| 2941 | gcggcttcaa ggctgggagg aacatgcgtc gcaaactctt tggggtcttg cggctgaagt |
| 3001 | gtcacagcct gtttctggat ttgcaggtga acagcctcca gacggtgtgc accaacatct |
| 3061 | acaagatcct cctgctgcag gcgtacaggt ttcacgcatg tgtgctgcag ctcccatttc |
| 3121 | atcagcaagt ttggaagaac cccacatttt tcctgcgcgt catctctgac acggcctccc |
| 3181 | tctgctactc catcctgaaa gccaagaacg cagggatgtc gctgggggcc aagggcgccg |
| 3241 | ccggccctct gccctccgag gccgtgcagt ggctgtgcca ccaagcattc ctgctcaagc |
| 3301 | tgactcgaca ccgtgtcacc tacgtgccac tcctggggtc actcaggaca gcccagacgc |
| 3361 | agctgagtcg gaagctcccg gggacgacgc tgactgccct ggaggccgca gccaacccgg |
| 3421 | cactgccctc agacttcaag accatcctgg actgatggcc acccgcccac agccaggccg |
| 3481 | agagcagaca ccagcagccc tgtcacgccg ggctctacgt cccagggagg gaggggcggc |
| 3541 | ccacacccag gcccgcaccg ctgggagtct gaggcctgag tgagtgtttg gccgaggcct |
| 3601 | gcatgtccgg ctgaaggctg agtgtccggc tgaggcctga gcgagtgtcc agccaagggc |
| 3661 | tgagtgtcca gcacacctgc cgtcttcact tccccacagg ctggcgctcg gctccacccc |
| 3721 | agggccagct tttcctcacc aggagcccgg cttccactcc ccacatagga atagtccatc |
| 3781 | cccagattcg ccattgttca cccctcgccc tgccctcctt tgccttccac ccccaccatc |
| 3841 | caggtggaga ccctgagaag gaccctggga gctctgggaa tttggagtga ccaaaggtgt |
| 3901 | gccctgtaca caggcgagga ccctgcacct ggatgggggt ccctgtgggt caaattgggg |
| 3961 | ggaggtgctg tgggagtaaa atactgaata tatgagtttt tcagttttga aaaaaaaaaa |
| 4021 | aaaaaaa |

[0609] In an embodiment, the hTERT is encoded by a nucleic acid having a sequence at least 80%, 85%, 90%, 95%, 96, 97%, 98%, or 99% identical to the sequence of SEQ ID NO: 64. In an embodiment, the hTERT is encoded by a nucleic acid of SEQ ID NO: 64.

[0610] Activation and Expansion of Immune Effector Cells (e.g., T Cells)

[0611] Immune effector cells such as T cells may be activated and expanded generally using methods as described, for example, in U.S. Pat. Nos. 6,352,694; 6,534,055; 6,905,680; 6,692,964; 5,858,358; 6,887,466; 6,905,681; 7,144,575; 7,067,318; 7,172,869; 7,232,566; 7,175,843; 5,883,223; 6,905,874; 6,797,514; 6,867,041; and U.S. Patent Application Publication No. 20060121005.

[0612] Generally, a population of immune effector cells e.g., T regulatory cell depleted cells, may be expanded by contact with a surface having attached thereto an agent that stimulates a CD3/TCR complex associated signal and a ligand that stimulates a costimulatory molecule on the surface of the T cells. In particular, T cell populations may be stimulated as described herein, such as by contact with an anti-CD3 antibody, or antigen-binding fragment thereof, or an anti-CD2 antibody immobilized on a surface, or by contact with a protein kinase C activator (e.g., bryostatin) in conjunction with a calcium ionophore. For co-stimulation of an accessory molecule on the surface of the T cells, a ligand that binds the accessory molecule is used. For example, a population of T cells can be contacted with an anti-CD3 antibody and an anti-CD28 antibody, under conditions appropriate for stimulating proliferation of the T cells. To stimulate proliferation of either CD4+ T cells or CD8+ T cells, an anti-CD3 antibody and an anti-CD28 antibody can be used. Examples of an anti-CD28 antibody include 9.3, B-T3, XR-CD28 (Diaclone, Besangon, France) can be used as can other methods commonly known in the art (Berg et al., Transplant Proc. 30(8):3975-3977, 1998; Haanen et al., J. Exp. Med. 190(9):13191328, 1999; Garland et al., J. Immunol Meth. 227(1-2):53-63, 1999).

[0613] In certain aspects, the primary stimulatory signal and the costimulatory signal for the T cell may be provided by different protocols. For example, the agents providing each signal may be in solution or coupled to a surface. When coupled to a surface, the agents may be coupled to the same surface (i.e., in “cis” formation) or to separate surfaces (i.e., in “trans” formation). Alternatively, one agent may be coupled to a surface and the other agent in solution. In one aspect, the agent providing the costimulatory signal is bound to a cell surface and the agent providing the primary activation signal is in solution or coupled to a surface. In certain aspects, both agents can be in solution. In one aspect, the agents may be in soluble form, and then cross-linked to a surface, such as a cell expressing Fc receptors or an antibody or other binding agent which will bind to the agents. In this regard, see for example, U.S. Patent Application Publication Nos. 20040101519 and 20060034810 for artificial antigen presenting cells (aAPCs) that are contemplated for use in activating and expanding T cells in the present invention.

[0614] In one aspect, the two agents are immobilized on beads, either on the same bead, i.e., “cis,” or to separate beads, i.e., “trans.” By way of example, the agent providing the primary activation signal is an anti-CD3 antibody or an antigen-binding fragment thereof and the agent providing the costimulatory signal is an anti-CD28 antibody or antigen-binding fragment thereof, and both agents are co-immobilized to the same bead in equivalent molecular amounts. In one aspect, a 1:1 ratio of each antibody bound to the beads for CD4+ T cell expansion and T cell growth is used. In certain aspects of the present invention, a ratio of anti CD3:CD28 antibodies bound to the beads is used such that an increase in T cell expansion is observed as compared to the expansion observed using a ratio of 1:1. In one particular aspect an increase of from about 1 to about 3 fold is observed as compared to the expansion observed using a ratio of 1:1. In one aspect, the ratio of CD3:CD28 antibody bound to the beads ranges from 100:1 to 1:100 and all integer values there between. In one aspect, more anti-CD28 antibody is bound to the particles than anti-CD3 antibody, i.e., the ratio of CD3:CD28 is less than one. In certain aspects, the ratio of anti CD28 antibody to anti CD3 antibody bound to the beads is greater than 2:1. In one particular aspect, a 1:100 CD3:CD28 ratio of antibody bound to beads is used. In one aspect, a 1:75 CD3:CD28 ratio of antibody bound to beads is used. In a further aspect, a 1:50 CD3:CD28 ratio of antibody bound to beads is used. In one aspect, a 1:30 CD3:CD28 ratio of antibody bound to beads is used. In one preferred aspect, a 1:10 CD3:CD28 ratio of antibody bound to beads is used. In one aspect, a 1:3 CD3:CD28 ratio of antibody bound to the beads is used. In yet one aspect, a 3:1 CD3:CD28 ratio of antibody bound to the beads is used.

[0615] Ratios of particles to cells from 1:500 to 500:1 and any integer values in between may be used to stimulate T cells or other target cells. As those of ordinary skill in the art can readily appreciate, the ratio of particles to cells may depend on particle size relative to the target cell. For example, small sized beads could only bind a few cells, while larger beads could bind many. In certain aspects the ratio of cells to particles ranges from 1:100 to 100:1 and any integer values in-between and in further aspects the ratio comprises 1:9 to 9:1 and any integer values in between, can also be used to stimulate T cells. The ratio of anti-CD3- and anti-CD28-coupled particles to T cells that result in T cell stimulation can vary as noted above, however certain preferred values include 1:100, 1:50, 1:40, 1:30, 1:20, 1:10, 1:9, 1:8, 1:7, 1:6, 1:5, 1:4, 1:3, 1:2, 1:1, 2:1, 3:1, 4:1, 5:1, 6:1, 7:1, 8:1, 9:1, 10:1, and 15:1 with one preferred ratio being at least 1:1 particles per T cell. In one aspect, a ratio of particles to cells of 1:1 or less is used. In one particular aspect, a preferred particle: cell ratio is 1:5. In further aspects, the ratio of particles to cells can be varied depending on the day of stimulation. For example, in one aspect, the ratio of particles to cells is from 1:1 to 10:1 on the first day and additional particles are added to the cells every day or every other day thereafter for up to 10 days, at final ratios of from 1:1 to 1:10 (based on cell counts on the day of addition). In one particular aspect, the ratio of particles to cells is 1:1 on the first day of stimulation and adjusted to 1:5 on the third and fifth days of stimulation. In one aspect, particles are added on a daily or every other day basis to a final ratio of 1:1 on the first day, and 1:5 on the third and fifth days of stimulation. In one aspect, the ratio of particles to cells is 2:1 on the first day of stimulation and adjusted to 1:10 on the third and fifth days of stimulation. In one aspect, particles are added on a daily or every other day basis to a final ratio of 1:1 on the first day, and 1:10 on the third and fifth days of stimulation. One of skill in the art will appreciate that a variety of other ratios may be suitable for use in the present invention. In particular, ratios will vary depending on particle size and on cell size and type. In one aspect, the most typical ratios for use are in the neighborhood of 1:1, 2:1 and 3:1 on the first day.

[0616] In further aspects, the cells, such as T cells, are combined with agent-coated beads, the beads and the cells are subsequently separated, and then the cells are cultured. In an alternative aspect, prior to culture, the agent-coated beads and cells are not separated but are cultured together. In a further aspect, the beads and cells are first concentrated by application of a force, such as a magnetic force, resulting in increased ligation of cell surface markers, thereby inducing cell stimulation.

[0617] By way of example, cell surface proteins may be ligated by allowing paramagnetic beads to which anti-CD3 and anti-CD28 are attached (3×28 beads) to contact the T cells. In one aspect the cells (for example, 10⁴ to 10⁹ T cells) and beads (for example, DYNABEADS® M-450 CD3/CD28 T paramagnetic beads at a ratio of 1:1) are combined in a buffer, for example PBS (without divalent cations such as, calcium and magnesium). Again, those of ordinary skill in the art can readily appreciate any cell concentration may be used. For example, the target cell may be very rare in the sample and comprise only 0.01% of the sample or the entire sample (i.e., 100%) may comprise the target cell of interest. Accordingly, any cell number is within the context of the present invention. In certain aspects, it may be desirable to significantly decrease the volume in which particles and cells are mixed together (i.e., increase the concentration of cells), to ensure maximum contact of cells and particles. For example, in one aspect, a concentration of about 10 billion cells/ml, 9 billion/ml, 8 billion/ml, 7 billion/ml, 6 billion/ml, 5 billion/ml, or 2 billion cells/ml is used. In one aspect, greater than 100 million cells/ml is used. In a further aspect, a concentration of cells of 10, 15, 20, 25, 30, 35, 40, 45, or 50 million cells/ml is used. In yet one aspect, a concentration of cells from 75, 80, 85, 90, 95, or 100 million cells/ml is used. In further aspects, concentrations of 125 or 150 million cells/ml can be used. Using high concentrations can result in increased cell yield, cell activation, and cell expansion. Further, use of high cell concentrations allows more efficient capture of cells that may weakly express target antigens of interest, such as CD28-negative T cells. Such populations of cells may have therapeutic value and would be desirable to obtain in certain aspects. For example, using high concentration of cells allows more efficient selection of CD8+ T cells that normally have weaker CD28 expression.

[0618] In one embodiment, cells transduced with a nucleic acid encoding a CAR, e.g., a CAR described herein, are expanded, e.g., by a method described herein. In one embodiment, the cells are expanded in culture for a period of several hours (e.g., about 2, 3, 4, 5, 6, 7, 8, 9, 10, 15, 18, 21 hours) to about 14 days (e.g., 1, 2, 3, 4, 5, 6, 7, 8, 9, 10, 11, 12, 13 or 14 days). In one embodiment, the cells are expanded for a period of 4 to 9 days. In one embodiment, the cells are expanded for a period of 8 days or less, e.g., 7, 6 or 5 days. In one embodiment, the cells, e.g., a CD19 CAR cell described herein, are expanded in culture for 5 days, and the resulting cells are more potent than the same cells expanded in culture for 9 days under the same culture conditions. Potency can be defined, e.g., by various T cell functions, e.g. proliferation, target cell killing, cytokine production, activation, migration, or combinations thereof. In one embodiment, the cells, e.g., a CD19 CAR cell described herein, expanded for 5 days show at least a one, two, three or four fold increase in cells doublings upon antigen stimulation as compared to the same cells expanded in culture for 9 days under the same culture conditions. In one embodiment, the cells, e.g., the cells expressing a CD19 CAR described herein, are expanded in culture for 5 days, and the resulting cells exhibit higher proinflammatory cytokine production, e.g., IFN-7 and/or GM-CSF levels, as compared to the same cells expanded in culture for 9 days under the same culture conditions. In one embodiment, the cells, e.g., a CD19 CAR cell described herein, expanded for 5 days show at least a one, two, three, four, five, ten fold or more increase in pg/ml of proinflammatory cytokine production, e.g., IFN-7 and/or GM-CSF levels, as compared to the same cells expanded in culture for 9 days under the same culture conditions.

[0619] Several cycles of stimulation may also be desired such that culture time of T cells can be 60 days or more. Conditions appropriate for T cell culture include an appropriate media (e.g., Minimal Essential Media or RPMI Media 1640 or, X-vivo 15, (Lonza)) that may contain factors necessary for proliferation and viability, including serum (e.g., fetal bovine or human serum), interleukin-2 (IL-2), insulin, IFN-7, IL-4, IL-7, GM-CSF, IL-10, IL-12, IL-15, TGFβ, and TNF-α or any other additives for the growth of cells known to the skilled artisan. Other additives for the growth of cells include, but are not limited to, surfactant, plasmanate, and reducing agents such as N-acetyl-cysteine and 2-mercaptoethanol. Media can include RPMI 1640, AIM-V, DMEM, MEM, α-MEM, F-12, X-Vivo 15, and X-Vivo 20, Optimizer, with added amino acids, sodium pyruvate, and vitamins, either serum-free or supplemented with an appropriate amount of serum (or plasma) or a defined set of hormones, and/or an amount of cytokine(s) sufficient for the growth and expansion of T cells. Antibiotics, e.g., penicillin and streptomycin, are included only in experimental cultures, not in cultures of cells that are to be infused into a subject. The target cells are maintained under conditions necessary to support growth, for example, an appropriate temperature (e.g., 37° C.) and atmosphere (e.g., air plus 5% CO₂).

[0620] In one embodiment, the cells are expanded in an appropriate media (e.g., media described herein) that includes one or more interleukin that result in at least a 200-fold (e.g., 200-fold, 250-fold, 300-fold, 350-fold) increase in cells over a 14 day expansion period, e.g., as measured by a method described herein such as flow cytometry. In one embodiment, the cells are expanded in the presence of IL-15 and/or IL-7 (e.g., IL-15 and IL-7).

[0621] In embodiments, methods described herein, e.g., CAR-expressing cell manufacturing methods, comprise removing T regulatory cells, e.g., CD25+ T cells, from a cell population, e.g., using an anti-CD25 antibody, or fragment thereof, or a CD25-binding ligand, IL-2. Methods of removing T regulatory cells, e.g., CD25+ T cells, from a cell population are described herein. In embodiments, the methods, e.g., manufacturing methods, further comprise contacting a cell population (e.g., a cell population in which T regulatory cells, such as CD25+ T cells, have been depleted; or a cell population that has previously contacted an anti-CD25 antibody, fragment thereof, or CD25-binding ligand) with IL-15 and/or IL-7. For example, the cell population (e.g., that has previously contacted an anti-CD25 antibody, fragment thereof, or CD25-binding ligand) is expanded in the presence of IL-15 and/or IL-7.

[0622] In some embodiments a CAR-expressing cell described herein is contacted with a composition comprising a interleukin-15 (IL-15) polypeptide, a interleukin-15 receptor alpha (IL-15Ra) polypeptide, or a combination of both a IL-15 polypeptide and a IL-15Ra polypeptide e.g., hetIL-15, during the manufacturing of the CAR-expressing cell, e.g., ex vivo. In embodiments, a CAR-expressing cell described herein is contacted with a composition comprising a IL-15 polypeptide during the manufacturing of the CAR-expressing cell, e.g., ex vivo. In embodiments, a CAR-expressing cell described herein is contacted with a composition comprising a combination of both a IL-15 polypeptide and a IL-15 Ra polypeptide during the manufacturing of the CAR-expressing cell, e.g., ex vivo. In embodiments, a CAR-expressing cell described herein is contacted with a composition comprising hetIL-15 during the manufacturing of the CAR-expressing cell, e.g., ex vivo.

[0623] In one embodiment the CAR-expressing cell described herein is contacted with a composition comprising hetIL-15 during ex vivo expansion. In an embodiment, the CAR-expressing cell described herein is contacted with a composition comprising an IL-15 polypeptide during ex vivo expansion. In an embodiment, the CAR-expressing cell described herein is contacted with a composition comprising both an IL-15 polypeptide and an IL-15Ra polypeptide during ex vivo expansion. In one embodiment the contacting results in the survival and proliferation of a lymphocyte subpopulation, e.g., CD8+ T cells.

[0624] T cells that have been exposed to varied stimulation times may exhibit different characteristics. For example, typical blood or apheresed peripheral blood mononuclear cell products have a helper T cell population (TH, CD4+) that is greater than the cytotoxic or suppressor T cell population (TC, CD8+). Ex vivo expansion of T cells by stimulating CD3 and CD28 receptors produces a population of T cells that prior to about days 8-9 consists predominately of TH cells, while after about days 8-9, the population of T cells comprises an increasingly greater population of TC cells. Accordingly, depending on the purpose of treatment, infusing a subject with a T cell population comprising predominately of TH cells may be advantageous. Similarly, if an antigen-specific subset of TC cells has been isolated it may be beneficial to expand this subset to a greater degree.

[0625] Further, in addition to CD4 and CD8 markers, other phenotypic markers vary significantly, but in large part, reproducibly during the course of the cell expansion process. Thus, such reproducibility enables the ability to tailor an activated T cell product for specific purposes.

[0626] Once a CAR described herein is constructed, various assays can be used to evaluate the activity of the molecule, such as but not limited to, the ability to expand T cells following antigen stimulation, sustain T cell expansion in the absence of re-stimulation, and anti-cancer activities in appropriate in vitro and animal models. Assays to evaluate the effects of a cars of the present invention are described in further detail below

[0627] Western blot analysis of CAR expression in primary T cells can be used to detect the presence of monomers and dimers. See, e.g., Milone et al., Molecular Therapy 17(8): 1453-1464 (2009). Very briefly, T cells (1:1 mixture of CD4⁺ and CD8⁺ T cells) expressing the CARs are expanded in vitro for more than 10 days followed by lysis and SDS-PAGE under reducing conditions. CARs containing the full length TCR-ζ cytoplasmic domain and the endogenous TCR-ζ chain are detected by western blotting using an antibody to the TCR-ζ chain. The same T cell subsets are used for SDS-PAGE analysis under non-reducing conditions to permit evaluation of covalent dimer formation.

[0628] In vitro expansion of CAR⁺ T cells following antigen stimulation can be measured by flow cytometry. For example, a mixture of CD4⁺ and CD8⁺ T cells are stimulated with αCD3/αCD28 aAPCs followed by transduction with lentiviral vectors expressing GFP under the control of the promoters to be analyzed. Exemplary promoters include the CMV IE gene, EF-1α, ubiquitin C, or phosphoglycerokinase (PGK) promoters. GFP fluorescence is evaluated on day 6 of culture in the CD4⁺ and/or CD8⁺ T cell subsets by flow cytometry. See, e.g., Milone et al., Molecular Therapy 17(8): 1453-1464 (2009). Alternatively, a mixture of CD4⁺ and CD8⁺ T cells are stimulated with αCD3/αCD28 coated magnetic beads on day 0, and transduced with CAR on day 1 using a bicistronic lentiviral vector expressing CAR along with eGFP using a 2A ribosomal skipping sequence. Cultures are re-stimulated with either a cancer associated antigen as described herein⁺ K562 cells (K562 expressing a cancer associated antigen as described herein), wild-type K562 cells (K562 wild type) or K562 cells expressing hCD32 and 4-1BBL in the presence of antiCD3 and anti-CD28 antibody (K562-BBL-3/28) following washing. Exogenous TL-2 is added to the cultures every other day at 100 IU/ml. GFP⁺ T cells are enumerated by flow cytometry using bead-based counting. See, e.g., Milone et al., Molecular Therapy 17(8): 1453-1464 (2009).

[0629] Sustained CAR⁺ T cell expansion in the absence of re-stimulation can also be measured. See, e.g., Milone et al., Molecular Therapy 17(8): 1453-1464 (2009). Briefly, mean T cell volume (fl) is measured on day 8 of culture using a Coulter Multisizer III particle counter, a Nexcelom Cellometer Vision or Millipore Scepter, following stimulation with αCD3/αCD28 coated magnetic beads on day 0, and transduction with the indicated CAR on day 1.

[0630] Animal models can also be used to measure a CART activity. For example, xenograft model using human a cancer associated antigen described herein-specific CAR⁺ T cells to treat a primary human pre-B ALL in immunodeficient mice can be used. See, e.g., Milone et al., Molecular Therapy 17(8): 1453-1464 (2009). Very briefly, after establishment of ALL, mice are randomized as to treatment groups. Different numbers of a cancer associated antigen-specific CAR engineered T cells are coinjected at a 1:1 ratio into NOD-SCID-T mice bearing B-ALL. The number of copies of a cancer associated antigen-specific CAR vector in spleen DNA from mice is evaluated at various times following T cell injection. Animals are assessed for leukemia at weekly intervals. Peripheral blood a cancer associate antigen as described herein⁺ B-ALL blast cell counts are measured in mice that are injected with a cancer associated antigen described herein-ζ CAR⁺ T cells or mock-transduced T cells. Survival curves for the groups are compared using the log-rank test. In addition, absolute peripheral blood CD4⁺ and CD8⁺ T cell counts 4 weeks following T cell injection in NOD-SCID-γ^{-/-} mice can also be analyzed. Mice are injected with leukemic cells and 3 weeks later are injected with T cells engineered to express CAR by a bicistronic lentiviral vector that encodes the CAR linked to eGFP. T cells are normalized to 45-50% input GFP⁺ T cells by mixing with mock-transduced cells prior to injection, and confirmed by flow cytometry. Animals are assessed for leukemia at 1-week intervals. Survival curves for the CAR⁺ T cell groups are compared using the log-rank test.

[0631] Dose dependent CAR treatment response can be evaluated. See, e.g., Milone et al., Molecular Therapy 17(8): 1453-1464 (2009). For example, peripheral blood is obtained 35-70 days after establishing leukemia in mice injected on day 21 with CAR T cells, an equivalent number of mock-transduced T cells, or no T cells. Mice from each group are randomly bled for determination of peripheral blood a cancer associate antigen as described herein⁺ ALL blast counts and then killed on days 35 and 49. The remaining animals are evaluated on days 57 and 70.

[0632] Assessment of cell proliferation and cytokine production has been previously described, e.g., at Milone et al., Molecular Therapy 17(8): 1453-1464 (2009). Briefly, assessment of CAR-mediated proliferation is performed in microtiter plates by mixing washed T cells with K562 cells expressing a cancer associated antigen described herein (K19) or CD32 and CD137 (KT32-BBL) for a final T-cell:K562 ratio of 2:1. K562 cells are irradiated with gamma-radiation prior to use. Anti-CD3 (clone OKT3) and anti-CD28 (clone 9.3) monoclonal antibodies are added to cultures with KT32-BBL cells to serve as a positive control for stimulating T-cell proliferation since these signals support long-term CD8+ T cell expansion ex vivo. T cells are enumerated in cultures using CountBright™ fluorescent beads (Invitrogen, Carlsbad, Calif.) and flow cytometry as described by the manufacturer. CAR⁺ T cells are identified by GFP expression using T cells that are engineered with eGFP-2A linked CAR-expressing lentiviral vectors. For CAR+ T cells not expressing GFP, the CAR+ T cells are detected with biotinylated recombinant a cancer associate antigen as described herein protein and a secondary avidin-PE conjugate. CD4+ and CD8⁺ expression on T cells are also simultaneously detected with specific monoclonal antibodies (BD Biosciences). Cytokine measurements are performed on supernatants collected 24 hours following re-stimulation using the human TH1/TH2 cytokine cytometric bead array kit (BD Biosciences, San Diego, Calif.) according the manufacturer's instructions. Fluorescence is assessed using a FACScalibur flow cytometer, and data is analyzed according to the manufacturer's instructions.

[0633] Cytotoxicity can be assessed by a standard 51Cr-release assay. See, e.g., Milone et al., Molecular Therapy 17(8): 1453-1464 (2009). Briefly, target cells (K562 lines and primary pro-B-ALL cells) are loaded with 51Cr (as NaCrO4, New England Nuclear, Boston, Mass.) at 37° C. for 2 hours with frequent agitation, washed twice in complete RPMI and plated into microtiter plates. Effector T cells are mixed with target cells in the wells in complete RPMI at varying ratios of effector cell:target cell (E:T). Additional wells containing media only (spontaneous release, SR) or a 1% solution of triton-X 100 detergent (total release, TR) are also prepared. After 4 hours of incubation at 37° C., supernatant from each well is harvested. Released 51Cr is then measured using a gamma particle counter (Packard Instrument Co., Waltham, Mass.). Each condition is performed in at least triplicate, and the percentage of lysis is calculated using the formula: % Lysis=(ER-SR)/(TR-SR), where ER represents the average 51Cr released for each experimental condition.

[0634] Imaging technologies can be used to evaluate specific trafficking and proliferation of CARs in tumor-bearing animal models. Such assays have been described, for example, in Barrett et al., Human Gene Therapy 22:1575-1586 (2011). Briefly, NOD/SCID/γc^{-/-} (NSG) mice are injected IV with Nalm-6 cells followed 7 days later with T cells 4 hour after electroporation with the CAR constructs. The T cells are stably transfected with a lentiviral construct to express firefly luciferase, and mice are imaged for bioluminescence. Alternatively, therapeutic efficacy and specificity of a single injection of CAR⁺ T cells in Nalm-6 xenograft model can be measured as the following: NSG mice are injected with Nalm-6 transduced to stably express firefly luciferase, followed by a single tail-vein injection of T cells electroporated with cars of the present invention 7 days later. Animals are imaged at various time points post injection. For example, photon-density heat maps of firefly luciferasepositive leukemia in representative mice at day 5 (2 days before treatment) and day 8 (24 hr post CAR⁺ PBLs) can be generated.

[0635] Other assays, including those described in the Example section herein as well as those that are known in the art can also be used to evaluate the CARs described herein.

### Therapeutic Application

[0636] In one aspect, the invention provides methods for treating a disease associated with expression of a cancer associated antigen described herein.

[0637] In one aspect, the present invention provides methods of treating cancer by providing to the subject in need thereof immune effector cells (e.g., T cells, NK cells) that are engineered to express an XCAR, wherein X represents a tumor antigen as described herein, and wherein the cancer cells express said X tumor antigen.

[0638] In one aspect, the present invention provides methods of treating cancer by providing to the subject in need thereof immune effector cells (e.g., T cells, NK cells) that are engineered to express a XCAR described herein, wherein the cancer cells express X. In one embodiment, X is expressed on both normal cells and cancers cells, but is expressed at lower levels on normal cells. In one embodiment, the method further comprises selecting a CAR that binds X with an affinity that allows the XCAR to bind and kill the cancer cells expressing X but less than 30%, 25%, 20%, 15%, 10%, 5% or less of the normal cells expressing X are killed, e.g., as determined by an assay described herein. For example, the assay described in FIGS. 13A and 13B can be used or a killing assay such as flow cytometry based on Cr51 CTL. In one embodiment, the selected CAR has an antigen binding domain that has a binding affinity KD of 10⁻⁴ M to 10⁻¹ M, e.g., 10⁻⁵ M to 10⁻⁷ M, e.g., 10⁻⁶ M or 10⁻⁷ M, for the target antigen. In one embodiment, the selected antigen binding domain has a binding affinity that is at least five-fold, 10-fold, 20-fold, 30-fold, 50-fold, 100-fold or 1,000-fold less than a reference antibody, e.g., an antibody described herein.

[0639] In one embodiment, the present invention provides methods of treating cancer by providing to the subject in need thereof immune effector cells (e.g., T cells, NK cells) that are engineered to express CD19 CAR, wherein the cancer cells express CD19. In one embodiment, the cancer to be treated is ALL (acute lymphoblastic leukemia), CLL (chronic lymphocytic leukemia), DLBCL (diffuse large B-cell lymphoma), MCL (Mantle cell lymphoma, or MM (multiple myeloma).

[0640] In one aspect, the present invention provides methods of treating cancer by providing to the subject in need thereof immune effector cells (e.g., T cells, NK cells) that are engineered to express an EGFRvIIICAR, wherein the cancer cells express EGFRvIII. In one embodiment, the cancer to be treated is glioblastoma.

[0641] In one aspect, the present invention provides methods of treating cancer by providing to the subject in need thereof immune effector cells (e.g., T cells, NK cells) that are engineered to express a mesothelinCAR, wherein the cancer cells express mesothelin. In one embodiment, the cancer to be treated is mesothelioma, pancreatic cancer, or ovarian cancer.

[0642] In one aspect, the present invention provides methods of treating cancer by providing to the subject in need thereof immune effector cells (e.g., T cells, NK cells) that are engineered to express a CD123CAR, wherein the cancer cells express CD123. In one embodiment, the cancer to be treated is AML.

[0643] In one aspect, the present invention provides methods of treating cancer by providing to the subject in need thereof immune effector cells (e.g., T cells, NK cells) that are engineered to express a CD22CAR, wherein the cancer cells express CD22. In one embodiment, the cancer to be treated is B cell malignancies.

[0644] In one aspect, the present invention provides methods of treating cancer by providing to the subject in need thereof immune effector cells (e.g., T cells, NK cells) that are engineered to express a CS-1CAR, wherein the cancer cells express CS-1. In one embodiment, the cancer to be treated is multiple myeloma.

[0645] In one aspect, the present invention provides methods of treating cancer by providing to the subject in need thereof immune effector cells (e.g., T cells, NK cells) that are engineered to express a CLL-1CAR, wherein the cancer cells express CLL-1. In one embodiment, the cancer to be treated is AML.

[0646] In one aspect, the present invention provides methods of treating cancer by providing to the subject in need thereof immune effector cells (e.g., T cells, NK cells) that are engineered to express a CD33CAR, wherein the cancer cells express CD33. In one embodiment, the cancer to be treated is AML.

[0647] In one aspect, the present invention provides methods of treating cancer by providing to the subject in need thereof immune effector cells (e.g., T cells, NK cells) that are engineered to express a GD2CAR, wherein the cancer cells express GD2. In one embodiment, the cancer to be treated is neuroblastoma.

[0648] In one aspect, the present invention provides methods of treating cancer by providing to the subject in need thereof immune effector cells (e.g., T cells, NK cells) that are engineered to express a BCMACAR, wherein the cancer cells express BCMA. In one embodiment, the cancer to be treated is multiple myeloma.

[0649] In one aspect, the present invention provides methods of treating cancer by providing to the subject in need thereof immune effector cells (e.g., T cells, NK cells) that are engineered to express a TnCAR, wherein the cancer cells express Tn antigen. In one embodiment, the cancer to be treated is ovarian cancer.

[0650] In one aspect, the present invention provides methods of treating cancer by providing to the subject in need thereof immune effector cells (e.g., T cells, NK cells) that are engineered to express a PSMACAR, wherein the cancer cells express PSMA. In one embodiment, the cancer to be treated is prostate cancer.

[0651] In one aspect, the present invention provides methods of treating cancer by providing to the subject in need thereof immune effector cells (e.g., T cells, NK cells) that are engineered to express a ROR1CAR, wherein the cancer cells express ROR1. In one embodiment, the cancer to be treated is B cell malignancies.

[0652] In one aspect, the present invention provides methods of treating cancer by providing to the subject in need thereof immune effector cells (e.g., T cells, NK cells) that are engineered to express a FLT3 CAR, wherein the cancer cells express FLT3. In one embodiment, the cancer to be treated is AML.

[0653] In one aspect, the present invention provides methods of treating cancer by providing to the subject in need thereof immune effector cells (e.g., T cells, NK cells) that are engineered to express a TAG72CAR, wherein the cancer cells express TAG72. In one embodiment, the cancer to be treated is gastrointestinal cancer.

[0654] In one aspect, the present invention provides methods of treating cancer by providing to the subject in need thereof immune effector cells (e.g., T cells, NK cells) that are engineered to express a CD38CAR, wherein the cancer cells express CD38. In one embodiment, the cancer to be treated is multiple myeloma.

[0655] In one aspect, the present invention provides methods of treating cancer by providing to the subject in need thereof immune effector cells (e.g., T cells, NK cells) that are engineered to express a CD44v6CAR, wherein the cancer cells express CD44v6. In one embodiment, the cancer to be treated is cervical cancer, AML, or MM.

[0656] In one aspect, the present invention provides methods of treating cancer by providing to the subject in need thereof immune effector cells (e.g., T cells, NK cells) that are engineered to express a CEACAR, wherein the cancer cells express CEA. In one embodiment, the cancer to be treated is pastrointestinal cancer, or pancreatic cancer.

[0657] In one aspect, the present invention provides methods of treating cancer by providing to the subject in need thereof immune effector cells (e.g., T cells, NK cells) that are engineered to express an EPCAMCAR, wherein the cancer cells express EPCAM. In one embodiment, the cancer to be treated is gastrointestinal cancer.

[0658] In one aspect, the present invention provides methods of treating cancer by providing to the subject in need thereof immune effector cells (e.g., T cells, NK cells) that are engineered to express a B7H3CAR, wherein the cancer cells express B7H3.

[0659] In one aspect, the present invention provides methods of treating cancer by providing to the subject in need thereof immune effector cells (e.g., T cells, NK cells) that are engineered to express a KITCAR, wherein the cancer cells express KIT. In one embodiment, the cancer to be treated is gastrointestinal cancer.

[0660] In one aspect, the present invention provides methods of treating cancer by providing to the subject in need thereof immune effector cells (e.g., T cells, NK cells) that are engineered to express an IL-13Ra2CAR, wherein the cancer cells express IL-13Ra2. In one embodiment, the cancer to be treated is glioblastoma.

[0661] In one aspect, the present invention provides methods of treating cancer by providing to the subject in need thereof immune effector cells (e.g., T cells, NK cells) that are engineered to express a PRSS21CAR, wherein the cancer cells express PRSS21. In one embodiment, the cancer to be treated is selected from ovarian, pancreatic, lung and breast cancer.

[0662] In one aspect, the present invention provides methods of treating cancer by providing to the subject in need thereof immune effector cells (e.g., T cells, NK cells) that are engineered to express a CD30CAR, wherein the cancer cells express CD30. In one embodiment, the cancer to be treated is lymphomas, or leukemias.

[0663] In one aspect, the present invention provides methods of treating cancer by providing to the subject in need thereof immune effector cells (e.g., T cells, NK cells) that are engineered to express a GD3CAR, wherein the cancer cells express GD3. In one embodiment, the cancer to be treated is melanoma.

[0664] In one aspect, the present invention provides methods of treating cancer by providing to the subject in need thereof immune effector cells (e.g., T cells, NK cells) that are engineered to express a CD171CAR, wherein the cancer cells express CD171. In one embodiment, the cancer to be treated is neuroblastoma, ovarian cancer, melanoma, breast cancer, pancreatic cancer, colon cancers, or NSCLC (non-small cell lung cancer).

[0665] In one aspect, the present invention provides methods of treating cancer by providing to the subject in need thereof immune effector cells (e.g., T cells, NK cells) that are engineered to express an IL-11RaCAR, wherein the cancer cells express IL-11Ra. In one embodiment, the cancer to be treated is osteosarcoma.

[0666] In one aspect, the present invention provides methods of treating cancer by providing to the subject in need thereof immune effector cells (e.g., T cells, NK cells) that are engineered to express a PSCACAR, wherein the cancer cells express PSCA. In one embodiment, the cancer to be treated is prostate cancer.

[0667] In one aspect, the present invention provides methods of treating cancer by providing to the subject in need thereof immune effector cells (e.g., T cells, NK cells) that are engineered to express a VEGFR2CAR, wherein the cancer cells express VEGFR2. In one embodiment, the cancer to be treated is a solid tumor.

[0668] In one aspect, the present invention provides methods of treating cancer by providing to the subject in need thereof immune effector cells (e.g., T cells, NK cells) that are engineered to express a LewisYCAR, wherein the cancer cells express LewisY. In one embodiment, the cancer to be treated is ovarian cancer, or AML.

[0669] In one aspect, the present invention provides methods of treating cancer by providing to the subject in need thereof immune effector cells (e.g., T cells, NK cells) that are engineered to express a CD24CAR, wherein the cancer cells express CD24. In one embodiment, the cancer to be treated is pancreatic cancer.

[0670] In one aspect, the present invention provides methods of treating cancer by providing to the subject in need thereof immune effector cells (e.g., T cells, NK cells) that are engineered to express a PDGFR-betaCAR, wherein the cancer cells express PDGFR-beta. In one embodiment, the cancer to be treated is breast cancer, prostate cancer, GIST (gastrointestinal stromal tumor), CML, DFSP (dermatofibrosarcoma protuberans), or glioma.

[0671] In one aspect, the present invention provides methods of treating cancer by providing to the subject in need thereof immune effector cells (e.g., T cells, NK cells) that are engineered to express a SSEA-4CAR, wherein the cancer cells express SSEA-4. In one embodiment, the cancer to be treated is glioblastoma, breast cancer, lung cancer, or stem cell cancer.

[0672] In one aspect, the present invention provides methods of treating cancer by providing to the subject in need thereof immune effector cells (e.g., T cells, NK cells) that are engineered to express a CD20CAR, wherein the cancer cells express CD20. In one embodiment, the cancer to be treated is B cell malignancies.

[0673] In one aspect, the present invention provides methods of treating cancer by providing to the subject in need thereof immune effector cells (e.g., T cells, NK cells) that are engineered to express a Folate receptor alphaCAR, wherein the cancer cells express folate receptor alpha. In one embodiment, the cancer to be treated is ovarian cancer, NSCLC, endometrial cancer, renal cancer, or other solid tumors.

[0674] In one aspect, the present invention provides methods of treating cancer by providing to the subject in need thereof immune effector cells (e.g., T cells, NK cells) that are engineered to express an ERBB2CAR, wherein the cancer cells express ERBB2 (Her2/neu). In one embodiment, the cancer to be treated is breast cancer, gastric cancer, colorectal cancer, lung cancer, or other solid tumors.

[0675] In one aspect, the present invention provides methods of treating cancer by providing to the subject in need thereof immune effector cells (e.g., T cells, NK cells) that are engineered to express a MUC1CAR, wherein the cancer cells express MUC1. In one embodiment, the cancer to be treated is breast cancer, lung cancer, or other solid tumors.

[0676] In one aspect, the present invention provides methods of treating cancer by providing to the subject in need thereof immune effector cells (e.g., T cells, NK cells) that are engineered to express an EGFRCAR, wherein the cancer cells express EGFR. In one embodiment, the cancer to be treated is glioblastoma, SCLC (small cell lung cancer), SCCHN (squamous cell carcinoma of the head and neck), NSCLC, or other solid tumors.

[0677] In one aspect, the present invention provides methods of treating cancer by providing to the subject in need thereof immune effector cells (e.g., T cells, NK cells) that are engineered to express a NCAMCAR, wherein the cancer cells express NCAM. In one embodiment, the cancer to be treated is neuroblastoma, or other solid tumors.

[0678] In one aspect, the present invention provides methods of treating cancer by providing to the subject in need thereof immune effector cells (e.g., T cells, NK cells) that are engineered to express a CAIXCAR, wherein the cancer cells express CAIX. In one embodiment, the cancer to be treated is renal cancer, CRC, cervical cancer, or other solid tumors.

[0679] In one aspect, the present invention provides methods of treating cancer by providing to the subject in need thereof immune effector cells (e.g., T cells, NK cells) that are engineered to express an EphA2CAR, wherein the cancer cells express EphA2. In one embodiment, the cancer to be treated is GBM.

[0680] In one aspect, the present invention provides methods of treating cancer by providing to the subject in need thereof immune effector cells (e.g., T cells, NK cells) that are engineered to express a GD3CAR, wherein the cancer cells express GD3. In one embodiment, the cancer to be treated is melanoma.

[0681] In one aspect, the present invention provides methods of treating cancer by providing to the subject in need thereof immune effector cells (e.g., T cells, NK cells) that are engineered to express a Fucosyl GM1CAR, wherein the cancer cells express Fucosyl GM In one aspect, the present invention provides methods of treating cancer by providing to the subject in need thereof immune effector cells (e.g., T cells, NK cells) that are engineered to express a sLeCAR, wherein the cancer cells express sLe. In one embodiment, the cancer to be treated is NSCLC, or AML.

[0682] In one aspect, the present invention provides methods of treating cancer by providing to the subject in need thereof immune effector cells (e.g., T cells, NK cells) that are engineered to express a GM3CAR, wherein the cancer cells express GM3.

[0683] In one aspect, the present invention provides methods of treating cancer by providing to the subject in need thereof immune effector cells (e.g., T cells, NK cells) that are engineered to express a TGS5CAR, wherein the cancer cells express TGS5.

[0684] In one aspect, the present invention provides methods of treating cancer by providing to the subject in need thereof immune effector cells (e.g., T cells, NK cells) that are engineered to express a HMWMAACAR, wherein the cancer cells express HMWMAA. In one embodiment, the cancer to be treated is melanoma, glioblastoma, or breast cancer.

[0685] In one aspect, the present invention provides methods of treating cancer by providing to the subject in need thereof immune effector cells (e.g., T cells, NK cells) that are engineered to express an o-acetyl-GD2CAR, wherein the cancer cells express o-acetyl-GD2. In one embodiment, the cancer to be treated is neuroblastoma, or melanoma.

[0686] In one aspect, the present invention provides methods of treating cancer by providing to the subject in need thereof immune effector cells (e.g., T cells, NK cells) that are engineered to express a CD19CAR, wherein the cancer cells express CD19. In one embodiment, the cancer to be treated isFolate receptor beta AML, myeloma

[0687] In one aspect, the present invention provides methods of treating cancer by providing to the subject in need thereof immune effector cells (e.g., T cells, NK cells) that are engineered to express a TEM1/CD248CAR, wherein the cancer cells express TEM1/CD248. In one embodiment, the cancer to be treated is a solid tumor.

[0688] In one aspect, the present invention provides methods of treating cancer by providing to the subject in need thereof immune effector cells (e.g., T cells, NK cells) that are engineered to express a TEM7RCAR, wherein the cancer cells express TEM7R. In one embodiment, the cancer to be treated is solid tumor.

[0689] In one aspect, the present invention provides methods of treating cancer by providing to the subject in need thereof immune effector cells (e.g., T cells, NK cells) that are engineered to express a CLDN6CAR, wherein the cancer cells express CLDN6. In one embodiment, the cancer to be treated is ovarian cancer, lung cancer, or breast cancer.

[0690] In one aspect, the present invention provides methods of treating cancer by providing to the subject in need thereof immune effector cells (e.g., T cells, NK cells) that are engineered to express a TSHRCAR, wherein the cancer cells express TSHR. In one embodiment, the cancer to be treated is thyroid cancer, or multiple myeloma.

[0691] In one aspect, the present invention provides methods of treating cancer by providing to the subject in need thereof immune effector cells (e.g., T cells, NK cells) that are engineered to express a GPRC5DCAR, wherein the cancer cells express GPRC5D. In one embodiment, the cancer to be treated is multiple myeloma.

[0692] In one aspect, the present invention provides methods of treating cancer by providing to the subject in need thereof immune effector cells (e.g., T cells, NK cells) that are engineered to express a CXORF61CAR, wherein the cancer cells express CXORF61.

[0693] In one aspect, the present invention provides methods of treating cancer by providing to the subject in need thereof immune effector cells (e.g., T cells, NK cells) that are engineered to express a CD97CAR, wherein the cancer cells express CD97. In one embodiment, the cancer to be treated is B cell malignancies, gastric cancer, pancreatic cancer, esophageal cancer, glioblastoma, breast cancer, or colorectal cancer.

[0694] In one aspect, the present invention provides methods of treating cancer by providing to the subject in need thereof immune effector cells (e.g., T cells, NK cells) that are engineered to express a CD179aCAR, wherein the cancer cells express CD179a. In one embodiment, the cancer to be treated is B cell malignancies.

[0695] In one aspect, the present invention provides methods of treating cancer by providing to the subject in need thereof immune effector cells (e.g., T cells, NK cells) that are engineered to express an ALK CAR, wherein the cancer cells express ALK. In one embodiment, the cancer to be treated is NSCLC, ALCL (anaplastic large cell lymphoma), IMT (inflammatory myofibroblastic tumor), or neuroblastoma.

[0696] In one aspect, the present invention provides methods of treating cancer by providing to the subject in need thereof immune effector cells (e.g., T cells, NK cells) that are engineered to express a Polysialic acid CAR, wherein the cancer cells express Polysialic acid. In one embodiment, the cancer to be treated is small cell lung cancer.

[0697] In one aspect, the present invention provides methods of treating cancer by providing to the subject in need thereof immune effector cells (e.g., T cells, NK cells) that are engineered to express a PLAC1CAR, wherein the cancer cells express PLAC1. In one embodiment, the cancer to be treated is HCC (hepatocellular carcinoma).

[0698] In one aspect, the present invention provides methods of treating cancer by providing to the subject in need thereof immune effector cells (e.g., T cells, NK cells) that are engineered to express a GloboHCAR, wherein the cancer cells express GloboH. In one embodiment, the cancer to be treated is ovarian cancer, gastric cancer, prostate cancer, lung cancer, breast cancer, or pancreatic cancer.

[0699] In one aspect, the present invention provides methods of treating cancer by providing to the subject in need thereof immune effector cells (e.g., T cells, NK cells) that are engineered to express a NY-BR-1CAR, wherein the cancer cells express NY-BR-1. In one embodiment, the cancer to be treated is breast cancer.

[0700] In one aspect, the present invention provides methods of treating cancer by providing to the subject in need thereof immune effector cells (e.g., T cells, NK cells) that are engineered to express a UPK2CAR, wherein the cancer cells express UPK2. In one embodiment, the cancer to be treated is bladder cancer.

[0701] In one aspect, the present invention provides methods of treating cancer by providing to the subject in need thereof immune effector cells (e.g., T cells, NK cells) that are engineered to express a HAVCR1CAR, wherein the cancer cells express HAVCR1. In one embodiment, the cancer to be treated is renal cancer.

[0702] In one aspect, the present invention provides methods of treating cancer by providing to the subject in need thereof immune effector cells (e.g., T cells, NK cells) that are engineered to express a ADRB3CAR, wherein the cancer cells express ADRB3. In one embodiment, the cancer to be treated is Ewing sarcoma.

[0703] In one aspect, the present invention provides methods of treating cancer by providing to the subject in need thereof immune effector cells (e.g., T cells, NK cells) that are engineered to express a PANX3CAR, wherein the cancer cells express PANX3. In one embodiment, the cancer to be treated is osteosarcoma.

[0704] In one aspect, the present invention provides methods of treating cancer by providing to the subject in need thereof immune effector cells (e.g., T cells, NK cells) that are engineered to express a GPR20CAR, wherein the cancer cells express GPR20. In one embodiment, the cancer to be treated is GIST.

[0705] In one aspect, the present invention provides methods of treating cancer by providing to the subject in need thereof immune effector cells (e.g., T cells, NK cells) that are engineered to express a LY6KCAR, wherein the cancer cells express LY6K. In one embodiment, the cancer to be treated is breast cancer, lung cancer, ovary caner, or cervix cancer.

[0706] In one aspect, the present invention provides methods of treating cancer by providing to the subject in need thereof immune effector cells (e.g., T cells, NK cells) that are engineered to express a OR51E2CAR, wherein the cancer cells express OR51E2. In one embodiment, the cancer to be treated is prostate cancer.

[0707] In one aspect, the present invention provides methods of treating cancer by providing to the subject in need thereof immune effector cells (e.g., T cells, NK cells) that are engineered to express a TARPCAR, wherein the cancer cells express TARP. In one embodiment, the cancer to be treated is prostate cancer.

[0708] In one aspect, the present invention provides methods of treating cancer by providing to the subject in need thereof immune effector cells (e.g., T cells, NK cells) that are engineered to express a WT1CAR, wherein the cancer cells express WT1.

[0709] In one aspect, the present invention provides methods of treating cancer by providing to the subject in need thereof immune effector cells (e.g., T cells, NK cells) that are engineered to express a NY-ESO-1CAR, wherein the cancer cells express NY-ESO-1.

[0710] In one aspect, the present invention provides methods of treating cancer by providing to the subject in need thereof immune effector cells (e.g., T cells, NK cells) that are engineered to express a LAGE-1a CAR, wherein the cancer cells express LAGE-1a.

[0711] In one aspect, the present invention provides methods of treating cancer by providing to the subject in need thereof immune effector cells (e.g., T cells, NK cells) that are engineered to express a MAGE-A1CAR, wherein the cancer cells express MAGE-A1. In one embodiment, the cancer to be treated is melanoma.

[0712] In one aspect, the present invention provides methods of treating cancer by providing to the subject in need thereof immune effector cells (e.g., T cells, NK cells) that are engineered to express a MAGE A1CAR, wherein the cancer cells express MAGE A1.

[0713] In one aspect, the present invention provides methods of treating cancer by providing to the subject in need thereof immune effector cells (e.g., T cells, NK cells) that are engineered to express a ETV6-AML CAR, wherein the cancer cells express ETV6-AML.

[0714] In one aspect, the present invention provides methods of treating cancer by providing to the subject in need thereof immune effector cells (e.g., T cells, NK cells) that are engineered to express a sperm protein 17 CAR, wherein the cancer cells express sperm protein 17. In one embodiment, the cancer to be treated is ovarian cancer, HCC, or NSCLC.

[0715] In one aspect, the present invention provides methods of treating cancer by providing to the subject in need thereof immune effector cells (e.g., T cells, NK cells) that are engineered to express a XAGE1CAR, wherein the cancer cells express XAGE1. In one embodiment, the cancer to be treated is Ewings, or rhabdo cancer.

[0716] In one aspect, the present invention provides methods of treating cancer by providing to the subject in need thereof immune effector cells (e.g., T cells, NK cells) that are engineered to express a Tie 2 CAR, wherein the cancer cells express Tie 2. In one embodiment, the cancer to be treated is a solid tumor.

[0717] In one aspect, the present invention provides methods of treating cancer by providing to the subject in need thereof immune effector cells (e.g., T cells, NK cells) that are engineered to express a MAD-CT-1CAR, wherein the cancer cells express MAD-CT-1. In one embodiment, the cancer to be treated is prostate cancer, or melanoma.

[0718] In one aspect, the present invention provides methods of treating cancer by providing to the subject in need thereof immune effector cells (e.g., T cells, NK cells) that are engineered to express a MAD-CT-2CAR, wherein the cancer cells express MAD-CT-2. In one embodiment, the cancer to be treated is prostate cancer, melanoma.

[0719] In one aspect, the present invention provides methods of treating cancer by providing to the subject in need thereof immune effector cells (e.g., T cells, NK cells) that are engineered to express a Fos-related antigen 1 CAR, wherein the cancer cells express Fos-related antigen 1. In one embodiment, the cancer to be treated is glioma, squamous cell cancer, or pancreatic cancer.

[0720] In one aspect, the present invention provides methods of treating cancer by providing to the subject in need thereof immune effector cells (e.g., T cells, NK cells) that are engineered to express a p53CAR, wherein the cancer cells express p53.

[0721] In one aspect, the present invention provides methods of treating cancer by providing to the subject in need thereof immune effector cells (e.g., T cells, NK cells) that are engineered to express a prostein CAR, wherein the cancer cells express prostein.

[0722] In one aspect, the present invention provides methods of treating cancer by providing to the subject in need thereof immune effector cells (e.g., T cells, NK cells) that are engineered to express a survivin and telomerase CAR, wherein the cancer cells express survivin and telomerase.

[0723] In one aspect, the present invention provides methods of treating cancer by providing to the subject in need thereof immune effector cells (e.g., T cells, NK cells) that are engineered to express a PCTA-1/Galectin 8 CAR, wherein the cancer cells express PCTA-1/Galectin 8.

[0724] In one aspect, the present invention provides methods of treating cancer by providing to the subject in need thereof immune effector cells (e.g., T cells, NK cells) that are engineered to express a MelanA/MART1CAR, wherein the cancer cells express MelanA/MART1.

[0725] In one aspect, the present invention provides methods of treating cancer by providing to the subject in need thereof immune effector cells (e.g., T cells, NK cells) that are engineered to express a Ras mutant CAR, wherein the cancer cells express Ras mutant.

[0726] In one aspect, the present invention provides methods of treating cancer by providing to the subject in need thereof immune effector cells (e.g., T cells, NK cells) that are engineered to express a p53 mutant CAR, wherein the cancer cells express p53 mutant.

[0727] In one aspect, the present invention provides methods of treating cancer by providing to the subject in need thereof immune effector cells (e.g., T cells, NK cells) that are engineered to express a hTERT CAR, wherein the cancer cells express hTERT.

[0728] In one aspect, the present invention provides methods of treating cancer by providing to the subject in need thereof immune effector cells (e.g., T cells, NK cells) that are engineered to express a sarcoma translocation breakpoints CAR, wherein the cancer cells express sarcoma translocation breakpoints. In one embodiment, the cancer to be treated is sarcoma.

[0729] In one aspect, the present invention provides methods of treating cancer by providing to the subject in need thereof immune effector cells (e.g., T cells, NK cells) that are engineered to express a ML-IAP CAR, wherein the cancer cells express ML-IAP. In one embodiment, the cancer to be treated is melanoma.

[0730] In one aspect, the present invention provides methods of treating cancer by providing to the subject in need thereof immune effector cells (e.g., T cells, NK cells) that are engineered to express an ERGCAR, wherein the cancer cells express ERG (TMPRSS2 ETS fusion gene).

[0731] In one aspect, the present invention provides methods of treating cancer by providing to the subject in need thereof immune effector cells (e.g., T cells, NK cells) that are engineered to express a NA17CAR, wherein the cancer cells express NA17. In one embodiment, the cancer to be treated is melanoma.

[0732] In one aspect, the present invention provides methods of treating cancer by providing to the subject in need thereof immune effector cells (e.g., T cells, NK cells) that are engineered to express a PAX3CAR, wherein the cancer cells express PAX3. In one embodiment, the cancer to be treated is alveolar rhabdomyosarcoma.

[0733] In one aspect, the present invention provides methods of treating cancer by providing to the subject in need thereof immune effector cells (e.g., T cells, NK cells) that are engineered to express an androgen receptor CAR, wherein the cancer cells express androgen receptor. In one embodiment, the cancer to be treated is metastatic prostate cancer.

[0734] In one aspect, the present invention provides methods of treating cancer by providing to the subject in need thereof immune effector cells (e.g., T cells, NK cells) that are engineered to express a Cyclin B1CAR, wherein the cancer cells express Cyclin B1.

[0735] In one aspect, the present invention provides methods of treating cancer by providing to the subject in need thereof immune effector cells (e.g., T cells, NK cells) that are engineered to express a MYCNCAR, wherein the cancer cells express MYCN.

[0736] In one aspect, the present invention provides methods of treating cancer by providing to the subject in need thereof immune effector cells (e.g., T cells, NK cells) that are engineered to express a RhoC CAR, wherein the cancer cells express RhoC.

[0737] In one aspect, the present invention provides methods of treating cancer by providing to the subject in need thereof immune effector cells (e.g., T cells, NK cells) that are engineered to express a TRP-2CAR, wherein the cancer cells express TRP-2. In one embodiment, the cancer to be treated is melanoma.

[0738] In one aspect, the present invention provides methods of treating cancer by providing to the subject in need thereof immune effector cells (e.g., T cells, NK cells) that are engineered to express a CYP1B1CAR, wherein the cancer cells express CYP1B1. In one embodiment, the cancer to be treated is breast cancer, colon cancer, lung cancer, esophagus cancer, skin cancer, lymph node cancer, brain cancer, or testis cancer.

[0739] In one aspect, the present invention provides methods of treating cancer by providing to the subject in need thereof immune effector cells (e.g., T cells, NK cells) that are engineered to express a BORIS CAR, wherein the cancer cells express BORIS. In one embodiment, the cancer to be treated is lung cancer.

[0740] In one aspect, the present invention provides methods of treating cancer by providing to the subject in need thereof immune effector cells (e.g., T cells, NK cells) that are engineered to express a SART3CAR, wherein the cancer cells express SART3 In one aspect, the present invention provides methods of treating cancer by providing to the subject in need thereof immune effector cells (e.g., T cells, NK cells) that are engineered to express a PAX5CAR, wherein the cancer cells express PAX5.

[0741] In one aspect, the present invention provides methods of treating cancer by providing to the subject in need thereof immune effector cells (e.g., T cells, NK cells) that are engineered to express a OY-TES1CAR, wherein the cancer cells express OY-TES1.

[0742] In one aspect, the present invention provides methods of treating cancer by providing to the subject in need thereof immune effector cells (e.g., T cells, NK cells) that are engineered to express a LCK CAR, wherein the cancer cells express LCK.

[0743] In one aspect, the present invention provides methods of treating cancer by providing to the subject in need thereof immune effector cells (e.g., T cells, NK cells) that are engineered to express a AKAP-4CAR, wherein the cancer cells express AKAP-4.

[0744] In one aspect, the present invention provides methods of treating cancer by providing to the subject in need thereof immune effector cells (e.g., T cells, NK cells) that are engineered to express a SSX2CAR, wherein the cancer cells express SSX2.

[0745] In one aspect, the present invention provides methods of treating cancer by providing to the subject in need thereof immune effector cells (e.g., T cells, NK cells) that are engineered to express a RAGE-1CAR, wherein the cancer cells express RAGE-1. In one embodiment, the cancer to be treated is RCC (renal cell cancer), or other solid tumors In one aspect, the present invention provides methods of treating cancer by providing to the subject in need thereof immune effector cells (e.g., T cells, NK cells) that are engineered to express a human telomerase reverse transcriptase CAR, wherein the cancer cells express human telomerase reverse transcriptase. In one embodiment, the cancer to be treated is solid tumors.

[0746] In one aspect, the present invention provides methods of treating cancer by providing to the subject in need thereof immune effector cells (e.g., T cells, NK cells) that are engineered to express a RU1CAR, wherein the cancer cells express RU1.

[0747] In one aspect, the present invention provides methods of treating cancer by providing to the subject in need thereof immune effector cells (e.g., T cells, NK cells) that are engineered to express a RU2CAR, wherein the cancer cells express RU2.

[0748] In one aspect, the present invention provides methods of treating cancer by providing to the subject in need thereof immune effector cells (e.g., T cells, NK cells) that are engineered to express an intestinal carboxyl esterase CAR, wherein the cancer cells express intestinal carboxyl esterase. In one embodiment, the cancer to be treated is thyroid cancer, RCC, CRC (colorectal cancer), breast cancer, or other solid tumors.

[0749] In one aspect, the present invention provides methods of treating cancer by providing to the subject in need thereof immune effector cells (e.g., T cells, NK cells) that are engineered to express a Prostase CAR, wherein the cancer cells express Prostase.

[0750] In one aspect, the present invention provides methods of treating cancer by providing to the subject in need thereof immune effector cells (e.g., T cells, NK cells) that are engineered to express a PAPCAR, wherein the cancer cells express PAP.

[0751] In one aspect, the present invention provides methods of treating cancer by providing to the subject in need thereof immune effector cells (e.g., T cells, NK cells) that are engineered to express an IGF-I receptor CAR, wherein the cancer cells express IGF-I receptor.

[0752] In one aspect, the present invention provides methods of treating cancer by providing to the subject in need thereof immune effector cells (e.g., T cells, NK cells) that are engineered to express a gp100 CAR, wherein the cancer cells express gp100.

[0753] In one aspect, the present invention provides methods of treating cancer by providing to the subject in need thereof immune effector cells (e.g., T cells, NK cells) that are engineered to express a bcr-abl CAR, wherein the cancer cells express bcr-abl.

[0754] In one aspect, the present invention provides methods of treating cancer by providing to the subject in need thereof immune effector cells (e.g., T cells, NK cells) that are engineered to express a tyrosinase CAR, wherein the cancer cells express tyrosinase.

[0755] In one aspect, the present invention provides methods of treating cancer by providing to the subject in need thereof immune effector cells (e.g., T cells, NK cells) that are engineered to express a Fucosyl GM1CAR, wherein the cancer cells express Fucosyl GM1.

[0756] In one aspect, the present invention provides methods of treating cancer by providing to the subject in need thereof immune effector cells (e.g., T cells, NK cells) that are engineered to express a mut hsp70-2CAR, wherein the cancer cells express mut hsp70-2. In one embodiment, the cancer to be treated is melanoma.

[0757] In one aspect, the present invention provides methods of treating cancer by providing to the subject in need thereof immune effector cells (e.g., T cells, NK cells) that are engineered to express a CD79a CAR, wherein the cancer cells express CD79a.

[0758] In one aspect, the present invention provides methods of treating cancer by providing to the subject in need thereof immune effector cells (e.g., T cells, NK cells) that are engineered to express a CD79b CAR, wherein the cancer cells express CD79b.

[0759] In one aspect, the present invention provides methods of treating cancer by providing to the subject in need thereof immune effector cells (e.g., T cells, NK cells) that are engineered to express a CD72 CAR, wherein the cancer cells express CD72.

[0760] In one aspect, the present invention provides methods of treating cancer by providing to the subject in need thereof immune effector cells (e.g., T cells, NK cells) that are engineered to express a LAIR1 CAR, wherein the cancer cells express LAIR1.

[0761] In one aspect, the present invention provides methods of treating cancer by providing to the subject in need thereof immune effector cells (e.g., T cells, NK cells) that are engineered to express a FCAR CAR, wherein the cancer cells express FCAR.

[0762] In one aspect, the present invention provides methods of treating cancer by providing to the subject in need thereof immune effector cells (e.g., T cells, NK cells) that are engineered to express a LILRA2 CAR, wherein the cancer cells express LILRA2.

[0763] In one aspect, the present invention provides methods of treating cancer by providing to the subject in need thereof immune effector cells (e.g., T cells, NK cells) that are engineered to express a CD300LF CAR, wherein the cancer cells express CD300LF.

[0764] In one aspect, the present invention provides methods of treating cancer by providing to the subject in need thereof immune effector cells (e.g., T cells, NK cells) that are engineered to express a CLEC12A CAR, wherein the cancer cells express CLEC12A.

[0765] In one aspect, the present invention provides methods of treating cancer by providing to the subject in need thereof immune effector cells (e.g., T cells, NK cells) that are engineered to express a BST2 CAR, wherein the cancer cells express BST2.

[0766] In one aspect, the present invention provides methods of treating cancer by providing to the subject in need thereof immune effector cells (e.g., T cells, NK cells) that are engineered to express an EIR2 CAR, wherein the cancer cells express EMR2.

[0767] In one aspect, the present invention provides methods of treating cancer by providing to the subject in need thereof immune effector cells (e.g., T cells, NK cells) that are engineered to express a LY75 CAR, wherein the cancer cells express LY75.

[0768] In one aspect, the present invention provides methods of treating cancer by providing to the subject in need thereof immune effector cells (e.g., T cells, NK cells) that are engineered to express a GPC3 CAR, wherein the cancer cells express GPC3.

[0769] In one aspect, the present invention provides methods of treating cancer by providing to the subject in need thereof immune effector cells (e.g., T cells, NK cells) that are engineered to express a FCRL5 CAR, wherein the cancer cells express FCRL5.

[0770] In one aspect, the present invention provides methods of treating cancer by providing to the subject in need thereof immune effector cells (e.g., T cells, NK cells) that are engineered to express an IGLL1 CAR, wherein the cancer cells express IGLL1.

[0771] In one aspect, the present invention relates to treatment of a subject in vivo using an PD1 CAR such that growth of cancerous tumors is inhibited. A PD1 CAR may be used alone to inhibit the growth of cancerous tumors. Alternatively, PD1 CAR may be used in conjunction with other CARs, immunogenic agents, standard cancer treatments, or other antibodies. In one embodiment, the subject is treated with a PD1 CAR and an XCAR described herein. In an embodiment, a PD1 CAR is used in conjunction with another CAR, e.g., a CAR described herein, and a kinase inhibitor, e.g., a kinase inhibitor described herein.

[0772] In another aspect, a method of treating a subject, e.g., reducing or ameliorating, a hyperproliferative condition or disorder (e.g., a cancer), e.g., solid tumor, a soft tissue tumor, or a metastatic lesion, in a subject is provided. As used herein, the term “cancer” is meant to include all types of cancerous growths or oncogenic processes, metastatic tissues or malignantly transformed cells, tissues, or organs, irrespective of histopathologic type or stage of invasiveness. Examples of solid tumors include malignancies, e.g., sarcomas, adenocarcinomas, and carcinomas, of the various organ systems, such as those affecting liver, lung, breast, lymphoid, gastrointestinal (e.g., colon), genitourinary tract (e.g., renal, urothelial cells), prostate and pharynx. Adenocarcinomas include malignancies such as most colon cancers, rectal cancer, renal-cell carcinoma, liver cancer, non-small cell carcinoma of the lung, cancer of the small intestine and cancer of the esophagus. In one embodiment, the cancer is a melanoma, e.g., an advanced stage melanoma. Metastatic lesions of the aforementioned cancers can also be treated or prevented using the methods and compositions of the invention. Examples of other cancers that can be treated include bone cancer, pancreatic cancer, skin cancer, cancer of the head or neck, cutaneous or intraocular malignant melanoma, uterine cancer, ovarian cancer, rectal cancer, cancer of the anal region, stomach cancer, testicular cancer, uterine cancer, carcinoma of the fallopian tubes, carcinoma of the endometrium, carcinoma of the cervix, carcinoma of the vagina, carcinoma of the vulva, Hodgkin Disease, non-Hodgkin lymphoma, cancer of the esophagus, cancer of the small intestine, cancer of the endocrine system, cancer of the thyroid gland, cancer of the parathyroid gland, cancer of the adrenal gland, sarcoma of soft tissue, cancer of the urethra, cancer of the penis, chronic or acute leukemias including acute myeloid leukemia, chronic myeloid leukemia, acute lymphoblastic leukemia, chronic lymphocytic leukemia, solid tumors of childhood, lymphocytic lymphoma, cancer of the bladder, cancer of the kidney or ureter, carcinoma of the renal pelvis, neoplasm of the central nervous system (CNS), primary CNS lymphoma, tumor angiogenesis, spinal axis tumor, brain stem glioma, pituitary adenoma, Kaposi's sarcoma, epidermoid cancer, squamous cell cancer, T-cell lymphoma, environmentally induced cancers including those induced by asbestos, and combinations of said cancers. Treatment of metastatic cancers, e.g., metastatic cancers that express PD-L1 (Iwai et al. (2005) Int. Immunol. 17:133-144) can be effected using the antibody molecules described herein.

[0773] Exemplary cancers whose growth can be inhibited include cancers typically responsive to immunotherapy. Non-limiting examples of cancers for treatment include melanoma (e.g., metastatic malignant melanoma), renal cancer (e.g. clear cell carcinoma), prostate cancer (e.g. hormone refractory prostate adenocarcinoma), breast cancer, colon cancer and lung cancer (e.g. non-small cell lung cancer). Additionally, refractory or recurrent malignancies can be treated using the molecules described herein.

[0774] In one aspect, the invention pertains to a vector comprising a CAR operably linked to promoter for expression in mammalian immune effector cells (e.g., T cells, NK cells). In one aspect, the invention provides a recombinant immune effector cell expressing a CAR of the present invention for use in treating cancer expressing a cancer associate antigen as described herein. In one aspect, CAR-expressing cells of the invention is capable of contacting a tumor cell with at least one cancer associated antigen expressed on its surface such that the CAR-expressing cell targets the cancer cell and growth of the cancer is inhibited.

[0775] In one aspect, the invention pertains to a method of inhibiting growth of a cancer, comprising contacting the cancer cell with a CAR-expressing cell of the present invention such that the CART is activated in response to the antigen and targets the cancer cell, wherein the growth of the tumor is inhibited.

[0776] In one aspect, the invention pertains to a method of treating cancer in a subject. The method comprises administering to the subject CAR-expressing cell of the present invention such that the cancer is treated in the subject. In one aspect, the cancer associated with expression of a cancer associate antigen as described herein is a hematological cancer. In one aspect, the hematological cancer is a leukemia or a lymphoma. In one aspect, a cancer associated with expression of a cancer associate antigen as described herein includes cancers and malignancies including, but not limited to, e.g., one or more acute leukemias including but not limited to, e.g., B-cell acute Lymphoid Leukemia (“BALL”), T-cell acute Lymphoid Leukemia (“TALL”), acute lymphoid leukemia (ALL); one or more chronic leukemias including but not limited to, e.g., chronic myelogenous leukemia (CML), Chronic Lymphoid Leukemia (CLL). Additional cancers or hematologic conditions associated with expression of a cancer associate antigen as described herein include, but are not limited to, e.g., B cell prolymphocytic leukemia, blastic plasmacytoid dendritic cell neoplasm, Burkitt's lymphoma, diffuse large B cell lymphoma, Follicular lymphoma, Hairy cell leukemia, small cell- or a large cell-follicular lymphoma, malignant lymphoproliferative conditions, MALT lymphoma, mantle cell lymphoma, Marginal zone lymphoma, multiple myeloma, myelodysplasia and myelodysplastic syndrome, non-Hodgkin lymphoma, plasmablastic lymphoma, plasmacytoid dendritic cell neoplasm, Waldenstrom macroglobulinemia, and “preleukemia” which are a diverse collection of hematological conditions united by ineffective production (or dysplasia) of myeloid blood cells, and the like. Further a disease associated with a cancer associate antigen as described herein expression include, but not limited to, e.g., atypical and/or non-classical cancers, malignancies, precancerous conditions or proliferative diseases associated with expression of a cancer associate antigen as described herein.

[0777] In some embodiments, a cancer that can be treated with CAR-expressing cell of the present invention is multiple myeloma. Multiple myeloma is a cancer of the blood, characterized by accumulation of a plasma cell clone in the bone marrow. Current therapies for multiple myeloma include, but are not limited to, treatment with lenalidomide, which is an analog of thalidomide. Lenalidomide has activities which include anti-tumor activity, angiogenesis inhibition, and immunomodulation. Generally, myeloma cells are thought to be negative for a cancer associate antigen as described herein expression by flow cytometry. Thus, in some embodiments, a CD19 CAR, e.g., as described herein, may be used to target myeloma cells. In some embodiments, cars of the present invention therapy can be used in combination with one or more additional therapies, e.g., lenalidomide treatment.

[0778] The invention includes a type of cellular therapy where immune effector cells (e.g., T cells, NK cells) are genetically modified to express a chimeric antigen receptor (CAR) and the CAR-expressing T cell or NK cell is infused to a recipient in need thereof. The infused cell is able to kill tumor cells in the recipient. Unlike antibody therapies, CAR-modified immune effector cells (e.g., T cells, NK cells) are able to replicate in vivo resulting in long-term persistence that can lead to sustained tumor control. In various aspects, the immune effector cells (e.g., T cells, NK cells) administered to the patient, or their progeny, persist in the patient for at least four months, five months, six months, seven months, eight months, nine months, ten months, eleven months, twelve months, thirteen months, fourteen month, fifteen months, sixteen months, seventeen months, eighteen months, nineteen months, twenty months, twenty-one months, twenty-two months, twenty-three months, two years, three years, four years, or five years after administration of the T cell or NK cell to the patient.

[0779] The invention also includes a type of cellular therapy where immune effector cells (e.g., T cells, NK cells) are modified, e.g., by in vitro transcribed RNA, to transiently express a chimeric antigen receptor (CAR) and the CAR T cell or NK cell is infused to a recipient in need thereof. The infused cell is able to kill tumor cells in the recipient. Thus, in various aspects, the immune effector cells (e.g., T cells, NK cells) administered to the patient, is present for less than one month, e.g., three weeks, two weeks, one week, after administration of the T cell or NK cell to the patient.

[0780] Without wishing to be bound by any particular theory, the anti-tumor immunity response elicited by the CAR-modified immune effector cells (e.g., T cells, NK cells) may be an active or a passive immune response, or alternatively may be due to a direct vs indirect immune response. In one aspect, the CAR transduced immune effector cells (e.g., T cells, NK cells) exhibit specific proinflammatory cytokine secretion and potent cytolytic activity in response to human cancer cells expressing the a cancer associate antigen as described herein, resist soluble a cancer associate antigen as described herein inhibition, mediate bystander killing and mediate regression of an established human tumor. For example, antigen-less tumor cells within a heterogeneous field of a cancer associate antigen as described herein-expressing tumor may be susceptible to indirect destruction by a cancer associate antigen as described herein-redirected immune effector cells (e.g., T cells, NK cells) that has previously reacted against adjacent antigen-positive cancer cells.

[0781] In one aspect, the fully-human CAR-modified immune effector cells (e.g., T cells, NK cells) of the invention may be a type of vaccine for ex vivo immunization and/or in vivo therapy in a mammal. In one aspect, the mammal is a human.

[0782] With respect to ex vivo immunization, at least one of the following occurs in vitro prior to administering the cell into a mammal: i) expansion of the cells, ii) introducing a nucleic acid encoding a CAR to the cells or iii) cryopreservation of the cells.

[0783] Ex vivo procedures are well known in the art and are discussed more fully below. Briefly, cells are isolated from a mammal (e.g., a human) and genetically modified (i.e., transduced or transfected in vitro) with a vector expressing a CAR disclosed herein. The CAR-modified cell can be administered to a mammalian recipient to provide a therapeutic benefit. The mammalian recipient may be a human and the CAR-modified cell can be autologous with respect to the recipient. Alternatively, the cells can be allogeneic, syngeneic or xenogeneic with respect to the recipient.

[0784] The procedure for ex vivo expansion of hematopoietic stem and progenitor cells is described in U.S. Pat. No. 5,199,942, incorporated herein by reference, can be applied to the cells of the present invention. Other suitable methods are known in the art, therefore the present invention is not limited to any particular method of ex vivo expansion of the cells. Briefly, ex vivo culture and expansion of immune effector cells (e.g., T cells, NK cells) comprises: (1) collecting CD34+ hematopoietic stem and progenitor cells from a mammal from peripheral blood harvest or bone marrow explants; and (2) expanding such cells ex vivo. In addition to the cellular growth factors described in U.S. Pat. No. 5,199,942, other factors such as flt3-L, IL-1, IL-3 and c-kit ligand, can be used for culturing and expansion of the cells.

[0785] In addition to using a cell-based vaccine in terms of ex vivo immunization, the present invention also provides compositions and methods for in vivo immunization to elicit an immune response directed against an antigen in a patient.

[0786] Generally, the cells activated and expanded as described herein may be utilized in the treatment and prevention of diseases that arise in individuals who are immunocompromised. In particular, the CAR-modified immune effector cells (e.g., T cells, NK cells) of the invention are used in the treatment of diseases, disorders and conditions associated with expression of a cancer associate antigen as described herein. In certain aspects, the cells of the invention are used in the treatment of patients at risk for developing diseases, disorders and conditions associated with expression of a cancer associate antigen as described herein. Thus, the present invention provides methods for the treatment or prevention of diseases, disorders and conditions associated with expression of a cancer associate antigen as described herein comprising administering to a subject in need thereof, a therapeutically effective amount of the CAR-modified immune effector cells (e.g., T cells, NK cells) of the invention.

[0787] In one aspect the CAR-expressing cells of the inventions may be used to treat a proliferative disease such as a cancer or malignancy or is a precancerous condition such as a myelodysplasia, a myelodysplastic syndrome or a preleukemia. Further a disease associated with a cancer associate antigen as described herein expression include, but not limited to, e.g., atypical and/or non-classical cancers, malignancies, precancerous conditions or proliferative diseases expressing a cancer associated antigen as described herein. Non-cancer related indications associated with expression of a cancer associate antigen as described herein include, but are not limited to, e.g., autoimmune disease, (e.g., lupus), inflammatory disorders (allergy and asthma) and transplantation.

[0788] The CAR-modified immune effector cells (e.g., T cells, NK cells) of the present invention may be administered either alone, or as a pharmaceutical composition in combination with diluents and/or with other components such as IL-2 or other cytokines or cell populations.

[0789] Hematologic Cancer

[0790] Hematological cancer conditions are the types of cancer such as leukemia, lymphoma, and malignant lymphoproliferative conditions that affect blood, bone marrow and the lymphatic system.

[0791] Leukemia can be classified as acute leukemia and chronic leukemia. Acute leukemia can be further classified as acute myelogenous leukemia (AML) and acute lymphoid leukemia (ALL). Chronic leukemia includes chronic myelogenous leukemia (CML) and chronic lymphoid leukemia (CLL). Other related conditions include myelodysplastic syndromes (MDS, formerly known as “preleukemia”) which are a diverse collection of hematological conditions united by ineffective production (or dysplasia) of myeloid blood cells and risk of transformation to AML.

[0792] Lymphoma is a group of blood cell tumors that develop from lymphocytes. Exemplary lymphomas include non-Hodgkin lymphoma and Hodgkin lymphoma.

[0793] The present invention provides for compositions and methods for treating cancer. In one aspect, the cancer is a hematologic cancer including but is not limited to hematolical cancer is a leukemia or a lymphoma. In one aspect, the CAR-expressing cells of the invention may be used to treat cancers and malignancies such as, but not limited to, e.g., acute leukemias including but not limited to, e.g., B-cell acute lymphoid leukemia (“BALL”), T-cell acute lymphoid leukemia (“TALL”), acute lymphoid leukemia (ALL); one or more chronic leukemias including but not limited to, e.g., chronic myelogenous leukemia (CML), chronic lymphocytic leukemia (CLL); additional hematologic cancers or hematologic conditions including, but not limited to, e.g., B cell prolymphocytic leukemia, blastic plasmacytoid dendritic cell neoplasm, Burkitt's lymphoma, diffuse large B cell lymphoma, Follicular lymphoma, Hairy cell leukemia, small cell- or a large cell-follicular lymphoma, malignant lymphoproliferative conditions, MALT lymphoma, mantle cell lymphoma, Marginal zone lymphoma, multiple myeloma, myelodysplasia and myelodysplastic syndrome, non-Hodgkin lymphoma, plasmablastic lymphoma, plasmacytoid dendritic cell neoplasm, Waldenstrom macroglobulinemia, and “preleukemia” which are a diverse collection of hematological conditions united by ineffective production (or dysplasia) of myeloid blood cells, and the like. Further a disease associated with a cancer associate antigen as described herein expression includes, but not limited to, e.g., atypical and/or non-classical cancers, malignancies, precancerous conditions or proliferative diseases expressing a cancer associate antigen as described herein.

[0794] The present invention also provides methods for inhibiting the proliferation or reducing a cancer associated antigen as described herein-expressing cell population, the methods comprising contacting a population of cells comprising a cancer associated antigen as described herein-expressing cell with a CAR-expressing T cell or NK cell of the invention that binds to the a cancer associate antigen as described herein-expressing cell. In a specific aspect, the present invention provides methods for inhibiting the proliferation or reducing the population of cancer cells expressing a cancer associated antigen as described herein, the methods comprising contacting a cancer associate antigen as described herein-expressing cancer cell population with a CAR-expressing T cell or NK cell of the invention that binds to a cancer associated antigen as described herein-expressing cell. In one aspect, the present invention provides methods for inhibiting the proliferation or reducing the population of cancer cells expressing a cancer associated antigen as described herein, the methods comprising contacting a cancer associated antigen as described herein-expressing cancer cell population with a CAR-expressing T cell or NK cell of the invention that binds to a cancer associated antigen as described herein-expressing cell. In certain aspects, a CAR-expressing T cell or NK cell of the invention reduces the quantity, number, amount or percentage of cells and/or cancer cells by at least 25%, at least 30%, at least 40%, at least 50%, at least 65%, at least 75%, at least 85%, at least 95%, or at least 99% in a subject with or animal model for myeloid leukemia or another cancer associated with a cancer associated antigen as described herein-expressing cells relative to a negative control. In one aspect, the subject is a human.

[0795] The present invention also provides methods for preventing, treating and/or managing a disease associated with a cancer associated antigen as described herein-expressing cells (e.g., a hematologic cancer or atypical cancer expressing a cancer associated antigen as described herein), the methods comprising administering to a subject in need a CAR T cell or NK cell of the invention that binds to a cancer associated antigen as described herein-expressing cell. In one aspect, the subject is a human. Non-limiting examples of disorders associated with a cancer associated antigen as described herein-expressing cells include autoimmune disorders (such as lupus), inflammatory disorders (such as allergies and asthma) and cancers (such as hematological cancers or atypical cancers expressing a cancer associated antigen as described herein).

[0796] The present invention also provides methods for preventing, treating and/or managing a disease associated with a cancer associated antigen as described herein-expressing cells, the methods comprising administering to a subject in need a CAR T cell or NK cell of the invention that binds to a cancer associated antigen as described herein-expressing cell. In one aspect, the subject is a human.

[0797] The present invention provides methods for preventing relapse of cancer associated with a cancer associated antigen as described herein-expressing cells, the methods comprising administering to a subject in need thereof aCAR T cell or NK cell of the invention that binds to a cancer associated antigen as described herein-expressing cell. In one aspect, the methods comprise administering to the subject in need thereof an effective amount of a CAR-expressingT cell or NK cell described herein that binds to a cancer associated antigen as described herein-expressing cell in combination with an effective amount of another therapy.

### Combination Therapies

[0798] A CAR-expressing cell described herein may be used in combination with other known agents and therapies. Administered “in combination”, as used herein, means that two (or more) different treatments are delivered to the subject during the course of the subject's affliction with the disorder, e.g., the two or more treatments are delivered after the subject has been diagnosed with the disorder and before the disorder has been cured or eliminated or treatment has ceased for other reasons. In some embodiments, the delivery of one treatment is still occurring when the delivery of the second begins, so that there is overlap in terms of administration. This is sometimes referred to herein as “simultaneous” or “concurrent delivery”. In other embodiments, the delivery of one treatment ends before the delivery of the other treatment begins. In some embodiments of either case, the treatment is more effective because of combined administration. For example, the second treatment is more effective, e.g., an equivalent effect is seen with less of the second treatment, or the second treatment reduces symptoms to a greater extent, than would be seen if the second treatment were administered in the absence of the first treatment, or the analogous situation is seen with the first treatment. In some embodiments, delivery is such that the reduction in a symptom, or other parameter related to the disorder is greater than what would be observed with one treatment delivered in the absence of the other. The effect of the two treatments can be partially additive, wholly additive, or greater than additive. The delivery can be such that an effect of the first treatment delivered is still detectable when the second is delivered.

[0799] A CAR-expressing cell described herein and the at least one additional therapeutic agent can be administered simultaneously, in the same or in separate compositions, or sequentially. For sequential administration, the CAR-expressing cell described herein can be administered first, and the additional agent can be administered second, or the order of administration can be reversed.

[0800] The CAR therapy and/or other therapeutic agents, procedures or modalities can be administered during periods of active disorder, or during a period of remission or less active disease. The CAR therapy can be administered before the other treatment, concurrently with the treatment, post-treatment, or during remission of the disorder.

[0801] When administered in combination, the CAR therapy and the additional agent (e.g., second or third agent), or all, can be administered in an amount or dose that is higher, lower or the same than the amount or dosage of each agent used individually, e.g., as a monotherapy. In certain embodiments, the administered amount or dosage of the CAR therapy, the additional agent (e.g., second or third agent), or all, is lower (e.g., at least 20%, at least 30%, at least 40%, or at least 50%) than the amount or dosage of each agent used individually, e.g., as a monotherapy. In other embodiments, the amount or dosage of the CAR therapy, the additional agent (e.g., second or third agent), or all, that results in a desired effect (e.g., treatment of cancer) is lower (e.g., at least 20%, at least 30%, at least 40%, or at least 50% lower) than the amount or dosage of each agent used individually, e.g., as a monotherapy, required to achieve the same therapeutic effect.

[0802] In further aspects, a CAR-expressing cell described herein may be used in a treatment regimen in combination with surgery, chemotherapy, radiation, immunosuppressive agents, such as cyclosporin, azathioprine, methotrexate, mycophenolate, and FK506, antibodies, or other immunoablative agents such as CAMPATH, anti-CD3 antibodies or other antibody therapies, cytoxin, fludarabine, cyclosporin, FK506, rapamycin, mycophenolic acid, steroids, FR901228, cytokines, and irradiation. peptide vaccine, such as that described in Izumoto et al. 2008 J Neurosurg 108:963-971.

[0803] In one embodiment, a CAR-expressing cell described herein can be used in combination with a chemotherapeutic agent. Exemplary chemotherapeutic agents include an anthracycline (e.g., doxorubicin (e.g., liposomal doxorubicin)). a vinca alkaloid (e.g., vinblastine, vincristine, vindesine, vinorelbine), an alkylating agent (e.g., cyclophosphamide, decarbazine, melphalan, ifosfamide, temozolomide), an immune cell antibody (e.g., alemtuzamab, gemtuzumab, rituximab, ofatumumab, tositumomab, brentuximab), an antimetabolite (including, e.g., folic acid antagonists, pyrimidine analogs, purine analogs and adenosine deaminase inhibitors (e.g., fludarabine)), an mTOR inhibitor, a TNFR glucocorticoid induced TNFR related protein (GITR) agonist, a proteasome inhibitor (e.g., aclacinomycin A, gliotoxin or bortezomib), an immunomodulator such as thalidomide or a thalidomide derivative (e.g., lenalidomide).

[0804] General Chemotherapeutic agents considered for use in combination therapies include anastrozole (Arimidex®), bicalutamide (Casodex®), bleomycin sulfate (Blenoxane®), busulfan (Myleran®), busulfan injection (Busulfex®), capecitabine (Xeloda®), N4-pentoxycarbonyl-5-deoxy-5-fluorocytidine, carboplatin (Paraplatin®), carmustine (BiCNU@), chlorambucil (Leukeran®), cisplatin (Platinol®), cladribine (Leustatin®), cyclophosphamide (Cytoxan® or Neosar®), cytarabine, cytosine arabinoside (Cytosar-U®), cytarabine liposome injection (DepoCyt®), dacarbazine (DTIC-Dome®), dactinomycin (Actinomycin D, Cosmegan), daunorubicin hydrochloride (Cerubidine®), daunorubicin citrate liposome injection (DaunoXome®), dexamethasone, docetaxel (Taxotere®), doxorubicin hydrochloride (Adriamycin®, Rubex®), etoposide (Vepesid®), fludarabine phosphate (Fludara®), 5-fluorouracil (Adrucil®, Efudex®), flutamide (Eulexin®), tezacitibine, Gemcitabine (difluorodeoxycitidine), hydroxyurea (Hydrea®), Idarubicin (Idamycin®), ifosfamide (IFEX®), irinotecan (Camptosar®), L-asparaginase (ELSPAR®), leucovorin calcium, melphalan (Alkeran®), 6-mercaptopurine (Purinethol®), methotrexate (Folex®), mitoxantrone (Novantrone®), mylotarg, paclitaxel (Taxol®), phoenix (Yttrium90/MX-DTPA), pentostatin, polifeprosan 20 with carmustine implant (Gliadel®), tamoxifen citrate (Nolvadex®), teniposide (Vumon®), 6-thioguanine, thiotepa, tirapazamine (Tirazone®), topotecan hydrochloride for injection (Hycamptin®), vinblastine (Velban®), vincristine (Oncovin®), and vinorelbine (Navelbine®).

[0805] Exemplary alkylating agents include, without limitation, nitrogen mustards, ethylenimine derivatives, alkyl sulfonates, nitrosoureas and triazenes): uracil mustard (Aminouracil Mustard®, Chlorethaminacil®, Demethyldopan®, Desmethyldopan®, Haemanthamine®, Nordopan®, Uracil nitrogen Mustard®, Uracillost®, Uracilmostaza®, Uramustin®, Uramustine®), chlormethine (Mustargen®), cyclophosphamide (Cytoxan®, Neosar®, Clafen®, Endoxan®, Procytox®, Revimmune™), ifosfamide (Mitoxana®), melphalan (Alkeran®), Chlorambucil (Leukeran®), pipobroman (Amedel®, Vercyte®), triethylenemelamine (Hemel®, Hexalen®, Hexastat®), triethylenethiophosphoramine, Temozolomide (Temodar®), thiotepa (Thioplex®), busulfan (Busilvex®, Myleran®), carmustine (BiCNU@), lomustine (CeeNU®), streptozocin (Zanosar®), and Dacarbazine (DTIC-Dome®). Additional exemplary alkylating agents include, without limitation, Oxaliplatin (Eloxatin®); Temozolomide (Temodar® and Temodal®); Dactinomycin (also known as actinomycin-D, Cosmegen®); Melphalan (also known as L-PAM, L-sarcolysin, and phenylalanine mustard, Alkeran®); Altretamine (also known as hexamethylmelamine (HMM), Hexalen®); Carmustine (BiCNU@); Bendamustine (Treanda®); Busulfan (Busulfex® and Myleran®); Carboplatin (Paraplatin®); Lomustine (also known as CCNU, CeeNU®); Cisplatin (also known as CDDP, Platinol® and Platinol®-AQ); Chlorambucil (Leukeran®); Cyclophosphamide (Cytoxan® and Neosar®); Dacarbazine (also known as DTIC, DIC and imidazole carboxamide, DTIC-Dome®); Altretamine (also known as hexamethylmelamine (HMM), Hexalen®); Ifosfamide (Ifex®); Prednumustine; Procarbazine (Matulane®); Mechlorethamine (also known as nitrogen mustard, mustine and mechloroethamine hydrochloride, Mustargen®); Streptozocin (Zanosar®); Thiotepa (also known as thiophosphoamide, TESPA and TSPA, Thioplex®); Cyclophosphamide (Endoxan®, Cytoxan®, Neosar®, Procytox®, Revimmune®); and Bendamustine HCl (Treanda®).

[0806] In embodiments, a CAR-expressing cell described herein is administered to a subject in combination with fludarabine, cyclophosphamide, and/or rituximab. In embodiments, a CAR-expressing cell described herein is administered to a subject in combination with fludarabine, cyclophosphamide, and rituximab (FCR). In embodiments, the subject has CLL. For example, the subject has a deletion in the short arm of chromosome 17 (del(17p), e.g., in a leukemic cell). In other examples, the subject does not have a del(17p). In embodiments, the subject comprises a leukemic cell comprising a mutation in the immunoglobulin heavy-chain variable-region (IgV_{H}) gene. In other embodiments, the subject does not comprise a leukemic cell comprising a mutation in the immunoglobulin heavy-chain variable-region (IgV_{H}) gene. In embodiments, the fludarabine is administered at a dosage of about 10-50 mg/m² (e.g., about 10-15, 15-20, 20-25, 25-30, 30-35, 35-40, 40-45, or 45-50 mg/m²), e.g., intravenously. In embodiments, the cyclophosphamide is administered at a dosage of about 200-300 mg/m² (e.g., about 200-225, 225-250, 250-275, or 275-300 mg/m²), e.g., intravenously. In embodiments, the rituximab is administered at a dosage of about 400-600 mg/m2 (e.g., 400-450, 450-500, 500-550, or 550-600 mg/m²), e.g., intravenously.

[0807] In embodiments, a CAR-expressing cell described herein is administered to a subject in combination with bendamustine and rituximab. In embodiments, the subject has CLL. For example, the subject has a deletion in the short arm of chromosome 17 (del(17p), e.g., in a leukemic cell). In other examples, the subject does not have a del(17p). In embodiments, the subject comprises a leukemic cell comprising a mutation in the immunoglobulin heavy-chain variable-region (IgV_{H}) gene. In other embodiments, the subject does not comprise a leukemic cell comprising a mutation in the immunoglobulin heavy-chain variable-region (IgV_{H}) gene. In embodiments, the bendamustine is administered at a dosage of about 70-110 mg/m2 (e.g., 70-80, 80-90, 90-100, or 100-110 mg/m2), e.g., intravenously. In embodiments, the rituximab is administered at a dosage of about 400-600 mg/m2 (e.g., 400-450, 450-500, 500-550, or 550-600 mg/m²), e.g., intravenously.

[0808] In embodiments, a CAR-expressing cell described herein is administered to a subject in combination with rituximab, cyclophosphamide, doxorubicine, vincristine, and/or a corticosteroid (e.g., prednisone). In embodiments, a CAR-expressing cell described herein is administered to a subject in combination with rituximab, cyclophosphamide, doxorubicine, vincristine, and prednisone (R-CHOP). In embodiments, the subject has diffuse large B-cell lymphoma (DLBCL). In embodiments, the subject has nonbulky limited-stage DLBCL (e.g., comprises a tumor having a size/diameter of less than 7 cm). In embodiments, the subject is treated with radiation in combination with the R-CHOP. For example, the subject is administered R-CHOP (e.g., 1-6 cycles, e.g., 1, 2, 3, 4, 5, or 6 cycles of R-CHOP), followed by radiation. In some cases, the subject is administered R-CHOP (e.g., 1-6 cycles, e.g., 1, 2, 3, 4, 5, or 6 cycles of R-CHOP) following radiation.

[0809] In embodiments, a CAR-expressing cell described herein is administered to a subject in combination with etoposide, prednisone, vincristine, cyclophosphamide, doxorubicin, and/or rituximab. In embodiments, a CAR-expressing cell described herein is administered to a subject in combination with etoposide, prednisone, vincristine, cyclophosphamide, doxorubicin, and rituximab (EPOCH-R). In embodiments, a CAR-expressing cell described herein is administered to a subject in combination with dose-adjusted EPOCH-R (DA-EPOCH-R). In embodiments, the subject has a B cell lymphoma, e.g., a Myc-rearranged aggressive B cell lymphoma.

[0810] In embodiments, a CAR-expressing cell described herein is administered to a subject in combination with rituximab and/or lenalidomide. Lenalidomide ((RS)-3-(4-Amino-1-oxo 1,3-dihydro-2H-isoindol-2-yl)piperidine-2,6-dione) is an immunomodulator. In embodiments, a CAR-expressing cell described herein is administered to a subject in combination with rituximab and lenalidomide. In embodiments, the subject has follicular lymphoma (FL) or mantle cell lymphoma (MCL). In embodiments, the subject has FL and has not previously been treated with a cancer therapy. In embodiments, lenalidomide is administered at a dosage of about 10-20 mg (e.g., 10-15 or 15-20 mg), e.g., daily. In embodiments, rituximab is administered at a dosage of about 350-550 mg/m² (e.g., 350-375, 375-400, 400-425, 425-450, 450-475, or 475-500 mg/m²), e.g., intravenously.

[0811] Exemplary mTOR inhibitors include, e.g., temsirolimus; ridaforolimus (formally known as deferolimus, (1R,2R,4S)-4-[(2R)-2 [(1R,9S,12S,15R,16E,18R,19R,21R, 23S,24E,26E,28Z,30S,32S,35R)-1,18-dihydroxy-19,30-dimethoxy-15,17,21,23, 29,35-hexamethyl-2,3,10,14,20-pentaoxo-11,36-dioxa-4-azatricyclo[30.3.1.0^{4,9}] hexatriaconta-16,24,26,28-tetraen-12-yl]propyl]-2-methoxycyclohexyl dimethylphosphinate, also known as AP23573 and MK8669, and described in PCT Publication No. WO 03/064383); everolimus (Afinitor® or RAD001); rapamycin (AY22989, Sirolimus®); simapimod (CAS 164301-51-3); emsirolimus, (5-{2,4-Bis[(3S)-3-methylmorpholin-4-yl]pyrido[2,3-d]pyrimidin-7-yl}-2-methoxyphenyl)methanol (AZD8055); 2-Amino-8-[trans-4-(2-hydroxyethoxy)cyclohexyl]-6-(6-methoxy-3-pyridinyl)-4-methyl-pyrido[2,3-d]pyrimidin-7(8H)-one (PF04691502, CAS 1013101-36-4); and N²-[1,4-dioxo-4-[[4-(4-oxo-8-phenyl-4H-1-benzopyran-2-yl)morpholinium-4-yl]methoxy]butyl]-L-arginylglycyl-L-α-aspartylL-serine-, inner salt (SF1126, CAS 936487-67-1) (SEQ ID NO: 1262), and XL765.

[0812] Exemplary immunomodulators include, e.g., afutuzumab (available from Roche®); pegfilgrastim (Neulasta®); lenalidomide (CC-5013, Revlimid®); thalidomide (Thalomid®), actimid (CC4047); and IRX-2 (mixture of human cytokines including interleukin 1, interleukin 2, and interferon 7, CAS 951209-71-5, available from IRX Therapeutics).

[0813] Exemplary anthracyclines include, e.g., doxorubicin (Adriamycin® and Rubex®); bleomycin (Lenoxane®); daunorubicin (dauorubicin hydrochloride, daunomycin, and rubidomycin hydrochloride, Cerubidine®); daunorubicin liposomal (daunorubicin citrate liposome, DaunoXome®); mitoxantrone (DHAD, Novantrone®); epirubicin (Ellence™); idarubicin (Idamycin®, Idamycin PFS®); mitomycin C (Mutamycin®); geldanamycin; herbimycin; ravidomycin; and desacetylravidomycin.

[0814] Exemplary vinca alkaloids include, e.g., vinorelbine tartrate (Navelbine®), Vincristine (Oncovin®), and Vindesine (Eldisine®)); vinblastine (also known as vinblastine sulfate, vincaleukoblastine and VLB, Alkaban-AQ® and Velban®); and vinorelbine (Navelbine®).

[0815] Exemplary proteosome inhibitors include bortezomib (Velcade®); carfilzomib (PX-171-007, (S)-4-Methyl-N-((S)-1-(((S)-4-methyl-1-((R)-2-methyloxiran-2-yl)-1-oxopentan-2-yl)amino)-1-oxo-3-phenylpropan-2-yl)-2-((S)-2-(2-morpholinoacetamido)-4-phenylbutanamido)-pentanamide); marizomib (NPI-0052); ixazomib citrate (MLN-9708); delanzomib (CEP-18770); and O-Methyl-N-[(2-methyl-5-thiazolyl)carbonyl]-L-seryl-O-methyl-N-[(1S)-2-[(2R)-2-methyl-2-oxiranyl]-2-oxo-1-(phenylmethyl)ethyl]-L-serinamide (ONX-0912).

[0816] In embodiments, a CAR-expressing cell described herein is administered to a subject in combination with brentuximab. Brentuximab is an antibody-drug conjugate of anti-CD30 antibody and monomethyl auristatin E. In embodiments, the subject has Hodgkin's lymphoma (HL), e.g., relapsed or refractory HL. In embodiments, the subject comprises CD30+HL. In embodiments, the subject has undergone an autologous stem cell transplant (ΔSCT). In embodiments, the subject has not undergone an ΔSCT. In embodiments, brentuximab is administered at a dosage of about 1-3 mg/kg (e.g., about 1-1.5, 1.5-2, 2-2.5, or 2.5-3 mg/kg), e.g., intravenously, e.g., every 3 weeks.

[0817] In embodiments, a CAR-expressing cell described herein is administered to a subject in combination with brentuximab and dacarbazine or in combination with brentuximab and bendamustine. Dacarbazine is an alkylating agent with a chemical name of 5-(3,3-Dimethyl-1-triazenyl)imidazole-4-carboxamide. Bendamustine is an alkylating agent with a chemical name of 4-[5-[Bis(2-chloroethyl)amino]-1-methylbenzimidazol-2-yl]butanoic acid. In embodiments, the subject has Hodgkin's lymphoma (HL). In embodiments, the subject has not previously been treated with a cancer therapy. In embodiments, the subject is at least 60 years of age, e.g., 60, 65, 70, 75, 80, 85, or older. In embodiments, dacarbazine is administered at a dosage of about 300-450 mg/m² (e.g., about 300-325, 325-350, 350-375, 375-400, 400-425, or 425-450 mg/m²), e.g., intravenously. In embodiments, bendamustine is administered at a dosage of about 75-125 mg/m2 (e.g., 75-100 or 100-125 mg/m², e.g., about 90 mg/m²), e.g., intravenously. In embodiments, brentuximab is administered at a dosage of about 1-3 mg/kg (e.g., about 1-1.5, 1.5-2, 2-2.5, or 2.5-3 mg/kg), e.g., intravenously, e.g., every 3 weeks.

[0818] In some embodiments, a CAR-expressing cell described herein is administered to a subject in combination with a CD20 inhibitor, e.g., an anti-CD20 antibody (e.g., an anti-CD20 mono- or bispecific antibody) or a fragment thereof. Exemplary anti-CD20 antibodies include but are not limited to rituximab, ofatumumab, ocrelizumab, veltuzumab, obinutuzumab, TRU-015 (Trubion Pharmaceuticals), ocaratuzumab, and Pro131921 (Genentech). See, e.g., Lim et al. Haematologica. 95.1(2010):135-43.

[0819] In some embodiments, the anti-CD20 antibody comprises rituximab. Rituximab is a chimeric mouse/human monoclonal antibody IgGa1 kappa that binds to CD20 and causes cytolysis of a CD20 expressing cell, e.g., as described in www.accessdata.fda.gov/drugsatfda_docs/label/2010/103705s53111bl.pdf. In embodiments, a CAR-expressing cell described herein is administered to a subject in combination with rituximab. In embodiments, the subject has CLL or SLL.

[0820] In some embodiments, rituximab is administered intravenously, e.g., as an intravenous infusion. For example, each infusion provides about 500-2000 mg (e.g., about 500-550, 550-600, 600-650, 650-700, 700-750, 750-800, 800-850, 850-900, 900-950, 950-1000, 1000-1100, 1100-1200, 1200-1300, 1300-1400, 1400-1500, 1500-1600, 1600-1700, 1700-1800, 1800-1900, or 1900-2000 mg) of rituximab. In some embodiments, rituximab is administered at a dose of 150 mg/m² to 750 mg/m², e.g., about 150-175 mg/m², 175-200 mg/m², 200-225 mg/m², 225-250 mg/m², 250-300 mg/m², 300-325 mg/m², 325-350 mg/m², 350-375 mg/m², 375-400 mg/m², 400-425 mg/m², 425-450 mg/m², 450-475 mg/m², 475-500 mg/m², 500-525 mg/m², 525-550 mg/m², 550-575 mg/m², 575-600 mg/m², 600-625 mg/m², 625-650 mg/m², 650-675 mg/m², or 675-700 mg/m², where m² indicates the body surface area of the subject. In some embodiments, rituximab is administered at a dosing interval of at least 4 days, e.g., 4, 7, 14, 21, 28, 35 days, or more. For example, rituximab is administered at a dosing interval of at least 0.5 weeks, e.g., 0.5, 1, 2, 3, 4, 5, 6, 7, 8 weeks, or more. In some embodiments, rituximab is administered at a dose and dosing interval described herein for a period of time, e.g., at least 2 weeks, e.g., at least 2, 3, 4, 5, 6, 7, 8, 9, 10, 11, 12, 13, 14, 15, 16, 17, 18, 19, 20 weeks, or greater. For example, rituximab is administered at a dose and dosing interval described herein for a total of at least 4 doses per treatment cycle (e.g., at least 4, 5, 6, 7, 8, 9, 10, 11, 12, 13, 14, 15, 16, or more doses per treatment cycle).

[0821] In some embodiments, the anti-CD20 antibody comprises ofatumumab. Ofatumumab is an anti-CD20 IgG1κ human monoclonal antibody with a molecular weight of approximately 149 kDa. For example, ofatumumab is generated using transgenic mouse and hybridoma technology and is expressed and purified from a recombinant murine cell line (NSO). See, e.g., www.accessdata.fda.gov/drugsatfda_docs/label/2009/1253261bl.pdf; and Clinical Trial Identifier number NCT01363128, NCT01515176, NCT01626352, and NCT01397591. In embodiments, a CAR-expressing cell described herein is administered to a subject in combination with ofatumumab. In embodiments, the subject has CLL or SLL.

[0822] In some embodiments, ofatumumab is administered as an intravenous infusion. For example, each infusion provides about 150-3000 mg (e.g., about 150-200, 200-250, 250-300, 300-350, 350-400, 400-450, 450-500, 500-550, 550-600, 600-650, 650-700, 700-750, 750-800, 800-850, 850-900, 900-950, 950-1000, 1000-1200, 1200-1400, 1400-1600, 1600-1800, 1800-2000, 2000-2200, 2200-2400, 2400-2600, 2600-2800, or 2800-3000 mg) of ofatumumab. In embodiments, ofatumumab is administered at a starting dosage of about 300 mg, followed by 2000 mg, e.g., for about 11 doses, e.g., for 24 weeks. In some embodiments, ofatumumab is administered at a dosing interval of at least 4 days, e.g., 4, 7, 14, 21, 28, 35 days, or more. For example, ofatumumab is administered at a dosing interval of at least 1 week, e.g., 1, 2, 3, 4, 5, 6, 7, 8, 9, 10, 11, 12, 24, 26, 28, 20, 22, 24, 26, 28, 30 weeks, or more. In some embodiments, ofatumumab is administered at a dose and dosing interval described herein for a period of time, e.g., at least 1 week, e.g., 1, 2, 3, 4, 5, 6, 7, 8, 9, 10, 11, 12, 13, 14, 15, 16, 17, 18, 19, 20, 22, 24, 26, 28, 30, 40, 50, 60 weeks or greater, or 1, 2, 3, 4, 5, 6, 7, 8, 9, 10, 11, 12 months or greater, or 1, 2, 3, 4, 5 years or greater. For example, ofatumumab is administered at a dose and dosing interval described herein for a total of at least 2 doses per treatment cycle (e.g., at least 2, 3, 4, 5, 6, 7, 8, 9, 10, 11, 12, 13, 14, 15, 16, 18, 20, or more doses per treatment cycle).

[0823] In some cases, the anti-CD20 antibody comprises ocrelizumab. Ocrelizumab is a humanized anti-CD20 monoclonal antibody, e.g., as described in Clinical Trials Identifier Nos. NCT00077870, NCT01412333, NCT00779220, NCT00673920, NCT01194570, and Kappos et al. Lancet. 19.378(2011):1779-87.

[0824] In some cases, the anti-CD20 antibody comprises veltuzumab. Veltuzumab is a humanized monoclonal antibody against CD20. See, e.g., Clinical Trial Identifier No. NCT00547066, NCT00546793, NCT01101581, and Goldenberg et al. Leuk Lymphoma. 51(5)(2010):747-55.

[0825] In some cases, the anti-CD20 antibody comprises GA101. GA101 (also called obinutuzumab or R05072759) is a humanized and glyco-engineered anti-CD20 monoclonal antibody. See, e.g., Robak. Curr. Opin. Investig. Drugs. 10.6(2009):588-96; Clinical Trial Identifier Numbers: NCT01995669, NCT01889797, NCT02229422, and NCT01414205; and www.accessdata.fda.gov/drugsatfda_docs/label/2013/125486s0001bl.pdf.

[0826] In some cases, the anti-CD20 antibody comprises AME-133v. AME-133v (also called LY2469298 or ocaratuzumab) is a humanized IgG1 monoclonal antibody against CD20 with increased affinity for the FcTRIIIa receptor and an enhanced antibody dependent cellular cytotoxicity (ADCC) activity compared with rituximab. See, e.g., Robak et al. BioDrugs 25.1(2011):13-25; and Forero-Torres et al. Clin Cancer Res. 18.5(2012):1395-403.

[0827] In some cases, the anti-CD20 antibody comprises PRO131921. PRO131921 is a humanized anti-CD20 monoclonal antibody engineered to have better binding to FcγRIIIa and enhanced ADCC compared with rituximab. See, e.g., Robak et al. BioDrugs 25.1(2011):13-25; and Casulo et al. Clin Immunol. 154.1(2014):37-46; and Clinical Trial Identifier No. NCT00452127.

[0828] In some cases, the anti-CD20 antibody comprises TRU-015. TRU-015 is an anti-CD20 fusion protein derived from domains of an antibody against CD20. TRU-015 is smaller than monoclonal antibodies, but retains Fc-mediated effector functions. See, e.g., Robak et al. BioDrugs 25.1(2011):13-25. TRU-015 contains an anti-CD20 single-chain variable fragment (scFv) linked to human IgG1 hinge, CH2, and CH3 domains but lacks CH1 and CL domains.

[0829] In some embodiments, an anti-CD20 antibody described herein is conjugated or otherwise bound to a therapeutic agent, e.g., a chemotherapeutic agent (e.g., cytoxan, fludarabine, histone deacetylase inhibitor, demethylating agent, peptide vaccine, anti-tumor antibiotic, tyrosine kinase inhibitor, alkylating agent, anti-microtubule or anti-mitotic agent), anti-allergic agent, anti-nausea agent (or anti-emetic), pain reliever, or cytoprotective agent described herein.

[0830] In embodiments, a CAR-expressing cell described herein is administered to a subject in combination with a B-cell lymphoma 2 (BCL-2) inhibitor (e.g., venetoclax, also called ABT-199 or GDC-0199;) and/or rituximab. In embodiments, a CAR-expressing cell described herein is administered to a subject in combination with venetoclax and rituximab. Venetoclax is a small molecule that inhibits the anti-apoptotic protein, BCL-2. The structure of venetoclax (4-(4-{[2-(4-chlorophenyl)-4,4-dimethylcyclohex-1-en-1-yl]methyl}piperazin-1-yl)-N-({3-nitro-4-[(tetrahydro-2H-pyran-4-ylmethyl)amino]phenyl}sulfonyl)-2-(1H-pyrrolo[2,3-b]pyridin-5-yloxy)benzamide) is shown below.

[chemical structure]

[0831] In embodiments, the subject has CLL. In embodiments, the subject has relapsed CLL, e.g., the subject has previously been administered a cancer therapy. In embodiments, venetoclax is administered at a dosage of about 15-600 mg (e.g., 15-20, 20-50, 50-75, 75-100, 100-200, 200-300, 300-400, 400-500, or 500-600 mg), e.g., daily. In embodiments, rituximab is administered at a dosage of about 350-550 mg/m2 (e.g., 350-375, 375-400, 400-425, 425-450, 450-475, or 475-500 mg/m2), e.g., intravenously, e.g., monthly

[0832] In an embodiment, cells expressing a CAR described herein are administered to a subject in combination with a molecule that decreases the Treg cell population. Methods that decrease the number of (e.g., deplete) Treg cells are known in the art and include, e.g., CD25 depletion, cyclophosphamide administration, modulating GITR function. Without wishing to be bound by theory, it is believed that reducing the number of Treg cells in a subject prior to apheresis or prior to administration of a CAR-expressing cell described herein reduces the number of unwanted immune cells (e.g., Tregs) in the tumor microenvironment and reduces the subject's risk of relapse. In one embodiment, cells expressing a CAR described herein are administered to a subject in combination with a molecule targeting GITR and/or modulating GITR functions, such as a GITR agonist and/or a GITR antibody that depletes regulatory T cells (Tregs). In embodiments, cells expressing a CAR described herein are administered to a subject in combination with cyclophosphamide. In one embodiment, the GITR binding molecules and/or molecules modulating GITR functions (e.g., GITR agonist and/or Treg depleting GITR antibodies) are administered prior to administration of the CAR-expressing cell. For example, in one embodiment, the GITR agonist can be administered prior to apheresis of the cells. In embodiments, cyclophosphamide is administered to the subject prior to administration (e.g., infusion or re-infusion) of the CAR-expressing cell or prior to aphersis of the cells. In embodiments, cyclophosphamide and an anti-GITR antibody are administered to the subject prior to administration (e.g., infusion or re-infusion) of the CAR-expressing cell or prior to apheresis of the cells. In one embodiment, the subject has cancer (e.g., a solid cancer or a hematological cancer such as ALL or CLL). In an embodiment, the subject has CLL. In embodiments, the subject has ALL. In embodiments, the subject has a solid cancer, e.g., a solid cancer described herein. Exemplary GITR agonists include, e.g., GITR fusion proteins and anti-GITR antibodies (e.g., bivalent anti-GITR antibodies) such as, e.g., a GITR fusion protein described in U.S. Pat. No. 6,111,090, European Patent No.: 090505B1, U.S. Pat. No. 8,586,023, PCT Publication Nos.: WO 2010/003118 and 2011/090754, or an anti-GITR antibody described, e.g., in U.S. Pat. No. 7,025,962, European Patent No.: 1947183B1, U.S. Pat. Nos. 7,812,135, 8,388,967, 8,591,886, European Patent No.: EP 1866339, PCT Publication No.: WO 2011/028683, PCT Publication No.:WO 2013/039954, PCT Publication No.: WO2005/007190, PCT Publication No.: WO 2007/133822, PCT Publication No.: WO2005/055808, PCT Publication No.: WO 99/40196, PCT Publication No.: WO 2001/03720, PCT Publication No.: WO99/20758, PCT Publication No.: WO2006/083289, PCT Publication No.: WO 2005/115451, U.S. Pat. No. 7,618,632, and PCT Publication No.: WO 2011/051726.

[0833] In one embodiment, a CAR expressing cell described herein is administered to a subject in combination with an mTOR inhibitor, e.g., an mTOR inhibitor described herein, e.g., a rapalog such as everolimus. In one embodiment, the mTOR inhibitor is administered prior to the CAR-expressing cell. For example, in one embodiment, the mTOR inhibitor can be administered prior to apheresis of the cells. In one embodiment, the subject has CLL.

[0834] In one embodiment, a CAR expressing cell described herein is administered to a subject in combination with a GITR agonist, e.g., a GITR agonist described herein. In one embodiment, the GITR agonist is administered prior to the CAR-expressing cell. For example, in one embodiment, the GITR agonist can be administered prior to apheresis of the cells. In one embodiment, the subject has CLL.

[0835] In one embodiment, a CAR-expressing cell described herein can be used in combination with a kinase inhibitor. In one embodiment, the kinase inhibitor is a CDK4 inhibitor, e.g., a CDK4 inhibitor described herein, e.g., a CD4/6 inhibitor, such as, e.g., 6-Acetyl-8-cyclopentyl-5-methyl-2-(5-piperazin-1-yl-pyridin-2-ylamino)-8H-pyrido[2,3-d]pyrimidin-7-one, hydrochloride (also referred to as palbociclib or PD0332991). In one embodiment, the kinase inhibitor is a BTK inhibitor, e.g., a BTK inhibitor described herein, such as, e.g., ibrutinib. In one embodiment, the kinase inhibitor is an mTOR inhibitor, e.g., an mTOR inhibitor described herein, such as, e.g., rapamycin, a rapamycin analog, OSI-027. The mTOR inhibitor can be, e.g., an mTORC1 inhibitor and/or an mTORC2 inhibitor, e.g., an mTORC1 inhibitor and/or mTORC2 inhibitor described herein. In one embodiment, the kinase inhibitor is a MNK inhibitor, e.g., a MNK inhibitor described herein, such as, e.g., 4-amino-5-(4-fluoroanilino)-pyrazolo [3,4-d]pyrimidine. The MNK inhibitor can be, e.g., a MNK1a, MNK1b, MNK2a and/or MNK2b inhibitor. In one embodiment, the kinase inhibitor is a dual PI3K/mTOR inhibitor described herein, such as, e.g., PF-04695102.

[0836] In one embodiment, the kinase inhibitor is a CDK4 inhibitor selected from aloisine A; flavopiridol or HMR-1275, 2-(2-chlorophenyl)-5,7-dihydroxy-8-[(3S,4R)-3-hydroxy-1-methyl-4-piperidinyl]-4-chromenone; crizotinib (PF-02341066; 2-(2-Chlorophenyl)-5,7-dihydroxy-8-[(2R,3S)-2-(hydroxymethyl)-1-methyl-3-pyrrolidinyl]-4H-1-benzopyran-4-one, hydrochloride (P276-00); 1-methyl-5-[[2-[5-(trifluoromethyl)-1H-imidazol-2-yl]-4-pyridinyl]oxy]-N-[4-(trifluoromethyl)phenyl]-1H-benzimidazol-2-amine (RAF265); indisulam (E7070); roscovitine (CYC202); palbociclib (PD0332991); dinaciclib (SCH727965); N-[5-[[(5-tert-butyloxazol-2-yl)methyl]thio]thiazol-2-yl]piperidine-4-carboxamide (BMS 387032); 4-[[9-chloro-7-(2,6-difluorophenyl)-5H-pyrimido[5,4-d][2]benzazepin-2-yl]amino]-benzoic acid (MLN8054); 5-[3-(4,6-difluoro-1H-benzimidazol-2-yl)-1H-indazol-5-yl]-N-ethyl-4-methyl-3-pyridinemethanamine (AG-024322); 4-(2,6-dichlorobenzoylamino)-1H-pyrazole-3-carboxylic acid N-(piperidin-4-yl)amide (AT7519); 4-[2-methyl-1-(1-methylethyl)-1H-imidazol-5-yl]-N-[4-(methylsulfonyl)phenyl]-2-pyrimidinamine (AZD5438); and XL281 (BMS908662).

[0837] In one embodiment, the kinase inhibitor is a CDK4 inhibitor, e.g., palbociclib (PD0332991), and the palbociclib is administered at a dose of about 50 mg, 60 mg, 70 mg, 75 mg, 80 mg, 90 mg, 100 mg, 105 mg, 110 mg, 115 mg, 120 mg, 125 mg, 130 mg, 135 mg (e.g., 75 mg, 100 mg or 125 mg) daily for a period of time, e.g., daily for 14-21 days of a 28 day cycle, or daily for 7-12 days of a 21 day cycle. In one embodiment, 1, 2, 3, 4, 5, 6, 7, 8, 9, 10, 11, 12 or more cycles of palbociclib are administered.

[0838] In embodiments, a CAR-expressing cell described herein is administered to a subject in combination with a cyclin-dependent kinase (CDK) 4 or 6 inhibitor, e.g., a CDK4 inhibitor or a CDK6 inhibitor described herein. In embodiments, a CAR-expressing cell described herein is administered to a subject in combination with a CDK4/6 inhibitor (e.g., an inhibitor that targets both CDK4 and CDK6), e.g., a CDK4/6 inhibitor described herein. In an embodiment, the subject has MCL. MCL is an aggressive cancer that is poorly responsive to currently available therapies, i.e., essentially incurable. In many cases of MCL, cyclin D1 (a regulator of CDK4/6) is expressed (e.g., due to chromosomal translocation involving immunoglobulin and Cyclin D1 genes) in MCL cells. Thus, without being bound by theory, it is thought that MCL cells are highly sensitive to CDK4/6 inhibition with high specificity (i.e., minimal effect on normal immune cells). CDK4/6 inhibitors alone have had some efficacy in treating MCL, but have only achieved partial remission with a high relapse rate. An exemplary CDK4/6 inhibitor is LEE011 (also called ribociclib), the structure of which is shown below.

[chemical structure]

[0839] Without being bound by theory, it is believed that administration of a CAR-expressing cell described herein with a CDK4/6 inhibitor (e.g., LEE011 or other CDK4/6 inhibitor described herein) can achieve higher responsiveness, e.g., with higher remission rates and/or lower relapse rates, e.g., compared to a CDK4/6 inhibitor alone.

[0840] In one embodiment, the kinase inhibitor is a BTK inhibitor selected from ibrutinib (PCI-32765); GDC-0834; RN-486; CGI-560; CGI-1764; HM-71224; CC-292; ONO-4059; CNX-774; and LFM-A13. In a preferred embodiment, the BTK inhibitor does not reduce or inhibit the kinase activity of interleukin-2-inducible kinase (ITK), and is selected from GDC-0834; RN-486; CGI-560; CGI-1764; HM-71224; CC-292; ONO-4059; CNX-774; and LFM-A13.

[0841] In one embodiment, the kinase inhibitor is a BTK inhibitor, e.g., ibrutinib (PCI-32765). In embodiments, a CAR-expressing cell described herein is administered to a subject in combination with a BTK inhibitor (e.g., ibrutinib). In embodiments, a CAR-expressing cell described herein is administered to a subject in combination with ibrutinib (also called PCI-32765). The structure of ibrutinib (1-[(3R)-3-[4-Amino-3-(4-phenoxyphenyl)-1H-pyrazolo[3,4-d]pyrimidin-1-yl]piperidin-1-yl]prop-2-en-1-one) is shown below.

[chemical structure]

[0842] In embodiments, the subject has CLL, mantle cell lymphoma (MCL), or small lymphocytic lymphoma (SLL). For example, the subject has a deletion in the short arm of chromosome 17 (del(17p), e.g., in a leukemic cell). In other examples, the subject does not have a del(17p). In embodiments, the subject has relapsed CLL or SLL, e.g., the subject has previously been administered a cancer therapy (e.g., previously been administered one, two, three, or four prior cancer therapies). In embodiments, the subject has refractory CLL or SLL. In other embodiments, the subject has follicular lymphoma, e.g., relapse or refractory follicular lymphoma. In some embodiments, ibrutinib is administered at a dosage of about 300-600 mg/day (e.g., about 300-350, 350-400, 400-450, 450-500, 500-550, or 550-600 mg/day, e.g., about 420 mg/day or about 560 mg/day), e.g., orally. In embodiments, the ibrutinib is administered at a dose of about 250 mg, 300 mg, 350 mg, 400 mg, 420 mg, 440 mg, 460 mg, 480 mg, 500 mg, 520 mg, 540 mg, 560 mg, 580 mg, 600 mg (e.g., 250 mg, 420 mg or 560 mg) daily for a period of time, e.g., daily for 21 day cycle, or daily for 28 day cycle. In one embodiment, 1, 2, 3, 4, 5, 6, 7, 8, 9, 10, 11, 12 or more cycles of ibrutinib are administered. Without being bound by theory, it is thought that the addition of ibrutinib enhances the T cell proliferative response and may shift T cells from a T-helper-2 (Th2) to T-helper-1 (Th1) phenotype. Th1 and Th2 are phenotypes of helper T cells, with Th1 versus Th2 directing different immune response pathways. A Th1 phenotype is associated with proinflammatory responses, e.g., for killing cells, such as intracellular pathogens/viruses or cancerous cells, or perpetuating autoimmune responses. A Th2 phenotype is associated with eosinophil accumulation and anti-inflammatory responses.

[0843] In one embodiment, the kinase inhibitor is an mTOR inhibitor selected from temsirolimus; ridaforolimus (1R,2R,4S)-4-[(2R)-2 [(1R,9S,12S,15R,16E,18R,19R,21R, 23S,24E,26E,28Z,30S,32S,35R)-1,18-dihydroxy-19,30-dimethoxy-15,17,21,23, 29,35-hexamethyl-2,3,10,14,20-pentaoxo-11,36-dioxa-4-azatricyclo[30.3.1.0^{4,9}] hexatriaconta-16,24,26,28-tetraen-12-yl]propyl]-2-methoxycyclohexyl dimethylphosphinate, also known as AP23573 and MK8669; everolimus (RAD001); rapamycin (AY22989); simapimod; (5-{2,4-bis[(3S)-3-methylmorpholin-4-yl]pyrido[2,3-d]pyrimidin-7-yl}-2-methoxyphenyl)methanol (AZD8055); 2-amino-8-[trans-4-(2-hydroxyethoxy)cyclohexyl]-6-(6-methoxy-3-pyridinyl)-4-methyl-pyrido[2,3-d]pyrimidin-7(8H)-one (PF04691502); and N²-[1,4-dioxo-4-[[4-(4-oxo-8-phenyl-4H-1-benzopyran-2-yl)morpholinium-4-yl]methoxy]butyl]-L-arginylglycyl-L-α-aspartylL-serine-, inner salt (SF1126) (SEQ ID NO: 1262); and XL765.

[0844] In one embodiment, the kinase inhibitor is an mTOR inhibitor, e.g., rapamycin, and the rapamycin is administered at a dose of about 3 mg, 4 mg, 5 mg, 6 mg, 7 mg, 8 mg, 9 mg, 10 mg (e.g., 6 mg) daily for a period of time, e.g., daily for 21 day cycle, or daily for 28 day cycle.

[0845] In one embodiment, 1, 2, 3, 4, 5, 6, 7, 8, 9, 10, 11, 12 or more cycles of rapamycin are administered. In one embodiment, the kinase inhibitor is an mTOR inhibitor, e.g., everolimus and the everolimus is administered at a dose of about 2 mg, 2.5 mg, 3 mg, 4 mg, 5 mg, 6 mg, 7 mg, 8 mg, 9 mg, 10 mg, 11 mg, 12 mg, 13 mg, 14 mg, 15 mg (e.g., 10 mg) daily for a period of time, e.g., daily for 28 day cycle. In one embodiment, 1, 2, 3, 4, 5, 6, 7, 8, 9, 10, 11, 12 or more cycles of everolimus are administered.

[0846] In one embodiment, the kinase inhibitor is an MNK inhibitor selected from CGP052088; 4-amino-3-(p-fluorophenylamino)-pyrazolo [3,4-d] pyrimidine (CGP57380); cercosporamide; ETC-1780445-2; and 4-amino-5-(4-fluoroanilino)-pyrazolo [3,4-d] pyrimidine.

[0847] In embodiments, a CAR-expressing cell described herein is administered to a subject in combination with a phosphoinositide 3-kinase (PI3K) inhibitor (e.g., a PI3K inhibitor described herein, e.g., idelalisib or duvelisib) and/or rituximab. In embodiments, a CAR-expressing cell described herein is administered to a subject in combination with idelalisib and rituximab. In embodiments, a CAR-expressing cell described herein is administered to a subject in combination with duvelisib and rituximab. Idelalisib (also called GS-1101 or CAL-101; Gilead) is a small molecule that blocks the delta isoform of PI3K. The structure of idelalisib (5-Fluoro-3-phenyl-2-[(1S)-1-(7H-purin-6-ylamino)propyl]-4(3H)-quinazolinone) is shown below.

[chemical structure]

[0848] Duvelisib (also called IPI-145; Infinity Pharmaceuticals and Abbvie) is a small molecule that blocks PI3K-δ,γ. The structure of duvelisib (8-Chloro-2-phenyl-3-[(1S)-1-(9H-purin-6-ylamino)ethyl]-1(2H)-isoquinolinone) is shown below.

[chemical structure]

[0849] In embodiments, the subject has CLL. In embodiments, the subject has relapsed CLL, e.g., the subject has previously been administered a cancer therapy (e.g., previously been administered an anti-CD20 antibody or previously been administered ibrutinib). For example, the subject has a deletion in the short arm of chromosome 17 (del(17p), e.g., in a leukemic cell). In other examples, the subject does not have a del(17p). In embodiments, the subject comprises a leukemic cell comprising a mutation in the immunoglobulin heavy-chain variable-region (IgV_{H}) gene. In other embodiments, the subject does not comprise a leukemic cell comprising a mutation in the immunoglobulin heavy-chain variable-region (IgV_{H}) gene. In embodiments, the subject has a deletion in the long arm of chromosome 11 (del(11q)). In other embodiments, the subject does not have a del(11q). In embodiments, idelalisib is administered at a dosage of about 100-400 mg (e.g., 100-125, 125-150, 150-175, 175-200, 200-225, 225-250, 250-275, 275-300, 325-350, 350-375, or 375-400 mg), e.g., BID. In embodiments, duvelisib is administered at a dosage of about 15-100 mg (e.g., about 15-25, 25-50, 50-75, or 75-100 mg), e.g., twice a day. In embodiments, rituximab is administered at a dosage of about 350-550 mg/m² (e.g., 350-375, 375-400, 400-425, 425-450, 450-475, or 475-500 mg/m²), e.g., intravenously.

[0850] In one embodiment, the kinase inhibitor is a dual phosphatidylinositol 3-kinase (PI3K) and mTOR inhibitor selected from 2-Amino-8-[trans-4-(2-hydroxyethoxy)cyclohexyl]-6-(6-methoxy-3-pyridinyl)-4-methyl-pyrido[2,3-d]pyrimidin-7(8H)-one (PF-04691502); N-[4-[[4-(Dimethylamino)-1-piperidinyl]carbonyl]phenyl]-N-[4-(4,6-di-4-morpholinyl-1,3,5-triazin-2-yl)phenyl]urea (PF-05212384, PKI-587); 2-Methyl-2-{4-[3-methyl-2-oxo-8-(quinolin-3-yl)-2,3-dihydro-1H-imidazo[4,5-c]quinolin-1-yl]phenyl}propanenitrile (BEZ-235); apitolisib (GDC-0980, RG7422); 2,4-Difluoro-N-{2-(methyloxy)-5-[4-(4-pyridazinyl)-6-quinolinyl]-3-pyridinyl}benzenesulfonamide (GSK2126458); 8-(6-methoxypyridin-3-yl)-3-methyl-1-(4-(piperazin-1-yl)-3-(trifluoromethyl)phenyl)-1H-imidazo[4,5-c]quinolin-2(3H)-one Maleic acid (NVP-BGT226); 3-[4-(4-Morpholinylpyrido[3′,2′:4,5]furo[3,2-d]pyrimidin-2-yl]phenol (PI-103); 5-(9-isopropyl-8-methyl-2-morpholino-9H-purin-6-yl)pyrimidin-2-amine (VS-5584, SB2343); and N-[2-[(3,5-Dimethoxyphenyl)amino]quinoxalin-3-yl]-4-[(4-methyl-3-methoxyphenyl)carbonyl]aminophenylsulfonamide (XL765).

[0851] In embodiments, a CAR-expressing cell described herein is administered to a subject in combination with an anaplastic lymphoma kinase (ALK) inhibitor. Exemplary ALK kinases include but are not limited to crizotinib (Pfizer), ceritinib (Novartis), alectinib (Chugai), brigatinib (also called AP26113; Ariad), entrectinib (Ignyta), PF-06463922 (Pfizer), TSR-011 (Tesaro) (see, e.g., Clinical Trial Identifier No. NCT02048488), CEP-37440 (Teva), and X-396 (Xcovery). In some embodiments, the subject has a solid cancer, e.g., a solid cancer described herein, e.g., lung cancer.

[0852] The chemical name of crizotinib is 3-[(1R)-1-(2,6-dichloro-3-fluorophenyl)ethoxy]-5-(1-piperidin-4-ylpyrazol-4-yl)pyridin-2-amine. The chemical name of ceritinib is 5-Chloro-N²-[2-isopropoxy-5-methyl-4-(4-piperidinyl)phenyl]-N4-[2-(isopropylsulfonyl)phenyl]-2,4-pyrimidinediamine. The chemical name of alectinib is 9-ethyl-6,6-dimethyl-8-(4-morpholinopiperidin-1-yl)-11-oxo-6,11-dihydro-5H-benzo[b]carbazole-3-carbonitrile. The chemical name of brigatinib is 5-Chloro-N²-{4-[4-(dimethylamino)-1-piperidinyl]-2-methoxyphenyl}-N⁴-[2-(dimethylphosphoryl)phenyl]-2,4-pyrimidinediamine. The chemical name of entrectinib is N-(5-(3,5-difluorobenzyl)-1H-indazol-3-yl)-4-(4-methylpiperazin-1-yl)-2-((tetrahydro-2H-pyran-4-yl)amino)benzamide. The chemical name of PF-06463922 is (10R)-7-Amino-12-fluoro-2,10,16-trimethyl-15-oxo-10,15,16,17-tetrahydro-2H-8,4-(metheno)pyrazolo[4,3-h][2,5,11]-benzoxadiazacyclotetradecine-3-carbonitrile. The chemical structure of CEP-37440 is (S)-2-((5-chloro-2-((6-(4-(2-hydroxyethyl)piperazin-1-yl)-1-methoxy-6,7,8,9-tetrahydro-5H-benzo[7]annulen-2-yl)amino)pyrimidin-4-yl)amino)-N-methylbenzamide. The chemical name of X-396 is (R)-6-amino-5-(1-(2,6-dichloro-3-fluorophenyl)ethoxy)-N-(4-(4-methylpiperazine-1-carbonyl)phenyl)pyridazine-3-carboxamide.

[0853] Drugs that inhibit either the calcium dependent phosphatase calcineurin (cyclosporine and FK506) or inhibit the p70S6 kinase that is important for growth factor induced signaling (rapamycin). (Liu et al., Cell 66:807-815, 1991; Henderson et al., Immun. 73:316-321, 1991; Bierer et al., Curr. Opin. Immun. 5:763-773, 1993) can also be used. In a further aspect, the cell compositions of the present invention may be administered to a patient in conjunction with (e.g., before, simultaneously or following) bone marrow transplantation, T cell ablative therapy using chemotherapy agents such as, fludarabine, external-beam radiation therapy (XRT), cyclophosphamide, and/or antibodies such as OKT3 or CAMPATH. In one aspect, the cell compositions of the present invention are administered following B-cell ablative therapy such as agents that react with CD20, e.g., Rituxan. For example, in one embodiment, subjects may undergo standard treatment with high dose chemotherapy followed by peripheral blood stem cell transplantation. In certain embodiments, following the transplant, subjects receive an infusion of the expanded immune cells of the present invention. In an additional embodiment, expanded cells are administered before or following surgery.

[0854] In embodiments, a CAR-expressing cell described herein is administered to a subject in combination with an indoleamine 2,3-dioxygenase (IDO) inhibitor. IDO is an enzyme that catalyzes the degradation of the amino acid, L-tryptophan, to kynurenine. Many cancers overexpress IDO, e.g., prostatic, colorectal, pancreatic, cervical, gastric, ovarian, head, and lung cancer. pDCs, macrophages, and dendritic cells (DCs) can express IDO. Without being bound by theory, it is thought that a decrease in L-tryptophan (e.g., catalyzed by IDO) results in an immunosuppressive milieu by inducing T-cell anergy and apoptosis. Thus, without being bound by theory, it is thought that an IDO inhibitor can enhance the efficacy of a CAR-expressing cell described herein, e.g., by decreasing the suppression or death of a CAR-expressing immune cell. In embodiments, the subject has a solid tumor, e.g., a solid tumor described herein, e.g., prostatic, colorectal, pancreatic, cervical, gastric, ovarian, head, or lung cancer. Exemplary inhibitors of IDO include but are not limited to 1-methyl-tryptophan, indoximod (NewLink Genetics) (see, e.g., Clinical Trial Identifier Nos. NCT01191216; NCT01792050), and INCB024360 (Incyte Corp.) (see, e.g., Clinical Trial Identifier Nos. NCT01604889; NCT01685255)

[0855] In embodiments, a CAR-expressing cell described herein is administered to a subject in combination with a modulator of myeloid-derived suppressor cells (MDSCs). MDSCs accumulate in the periphery and at the tumor site of many solid tumors. These cells suppress T cell responses, thereby hindering the efficacy of CAR-expressing cell therapy. Without being bound by theory, it is thought that administration of a MDSC modulator enhances the efficacy of a CAR-expressing cell described herein. In an embodiment, the subject has a solid tumor, e.g., a solid tumor described herein, e.g., glioblastoma. Exemplary modulators of MDSCs include but are not limited to MCS 110 and BLZ945. MCS 110 is a monoclonal antibody (mAb) against macrophage colony-stimulating factor (M-CSF). See, e.g., Clinical Trial Identifier No. NCT00757757. BLZ945 is a small molecule inhibitor of colony stimulating factor 1 receptor (CSF1R). See, e.g., Pyonteck et al. Nat. Med. 19(2013):1264-72. The structure of BLZ945 is shown below.

[chemical structure]

[0856] In embodiments, a CAR-expressing cell described herein is administered to a subject in combination with a CD19 CART cell (e.g., CTL019, e.g., as described in WO2012/079000, incorporated herein by reference). In embodiments, the subject has a CD19+ lymphoma, e.g., a CD19+ Non-Hodgkin's Lymphoma (NHL), a CD19+FL, or a CD19+ DLBCL. In embodiments, the subject has a relapsed or refractory CD19+ lymphoma. In embodiments, a lymphodepleting chemotherapy is administered to the subject prior to, concurrently with, or after administration (e.g., infusion) of CD19 CART cells. In an example, the lymphodepleting chemotherapy is administered to the subject prior to administration of CD19 CART cells. For example, the lymphodepleting chemotherapy ends 1-4 days (e.g., 1, 2, 3, or 4 days) prior to CD19 CART cell infusion. In embodiments, multiple doses of CD19 CART cells are administered, e.g., as described herein. For example, a single dose comprises about 5×10⁸ CD19 CART cells. In embodiments, a lymphodepleting chemotherapy is administered to the subject prior to, concurrently with, or after administration (e.g., infusion) of a CAR-expressing cell described herein, e.g., a non-CD19 CAR-expressing cell. In embodiments, a CD19 CART is administered to the subject prior to, concurrently with, or after administration (e.g., infusion) of a non-CD19 CAR-expressing cell, e.g., a non-CD19 CAR-expressing cell described herein.

[0857] In some embodiments, a CAR-expressing cell described herein is administered to a subject in combination with a interleukin-15 (IL-15) polypeptide, a interleukin-15 receptor alpha (IL-15Ra) polypeptide, or a combination of both a IL-15 polypeptide and a IL-15Ra polypeptide e.g., hetIL-15 (Admune Therapeutics, LLC). hetIL-15 is a heterodimeric non-covalent complex of IL-15 and IL-15Ra. hetIL-15 is described in, e.g., U.S. Pat. No. 8,124,084, U.S. 2012/0177598, U.S. 2009/0082299, U.S. 2012/0141413, and U.S. 2011/0081311, incorporated herein by reference. In embodiments, het-IL-15 is administered subcutaneously. In embodiments, the subject has a cancer, e.g., solid cancer, e.g., melanoma or colon cancer. In embodiments, the subject has a metastatic cancer.

[0858] In one embodiment, the subject can be administered an agent which reduces or ameliorates a side effect associated with the administration of a CAR-expressing cell. Side effects associated with the administration of a CAR-expressing cell include, but are not limited to CRS, and hemophagocytic lymphohistiocytosis (HLH), also termed Macrophage Activation Syndrome (MAS). Symptoms of CRS include high fevers, nausea, transient hypotension, hypoxia, and the like. CRS may include clinical constitutional signs and symptoms such as fever, fatigue, anorexia, myalgias, arthalgias, nausea, vomiting, and headache. CRS may include clinical skin signs and symptoms such as rash. CRS may include clinical gastrointestinal signs and symptoms such as nausea, vomiting and diarrhea. CRS may include clinical respiratory signs and symptoms such as tachypnea and hypoxemia. CRS may include clinical cardiovascular signs and symptoms such as tachycardia, widened pulse pressure, hypotension, increased cardiac output (early) and potentially diminished cardiac output (late). CRS may include clinical coagulation signs and symptoms such as elevated d-dimer, hyperfibrinogenemia with or without bleeding. CRS may include clinical renal signs and symptoms such as azotemia. CRS may include clinical hepatic signs and symptoms such as transaminitis and hyperbilirubinemia. CRS may include clinical neurologic signs and symptoms such as headache, mental status changes, confusion, delirium, word finding difficulty or frank aphasia, hallucinations, tremor, dymetria, altered gait, and seizures.

[0859] Accordingly, the methods described herein can comprise administering a CAR-expressing cell described herein to a subject and further administering one or more agents to manage elevated levels of a soluble factor resulting from treatment with a CAR-expressing cell. In one embodiment, the soluble factor elevated in the subject is one or more of IFN-γ, TNFα, IL-2 and IL-6. In an embodiment, the factor elevated in the subject is one or more of IL-1, GM-CSF, IL-10, IL-8, IL-5 and fraktalkine. Therefore, an agent administered to treat this side effect can be an agent that neutralizes one or more of these soluble factors. In one embodiment, the agent that neutralizes one or more of these soluble forms is an antibody or antigen binding fragment thereof. Examples of such agents include, but are not limited to a steroid (e.g., corticosteroid), an inhibitor of TNFα, and an inhibitor of IL-6. An example of a TNFα inhibitor is an anti-TNFa antibody molecule such as, infliximab, adalimumab, certolizumab pegol, and golimumab. Another example of a TNFα inhibitor is a fusion protein such as entanercept. Small molecule inhibitors of TNFα include, but are not limited to, xanthine derivatives (e.g. pentoxifylline) and bupropion. An example of an IL-6 inhibitor is an anti-IL-6 antibody molecule or an anti-IL-6 receptor antibody molecule such as tocilizumab (toc), sarilumab, elsilimomab, CNTO 328, ALD518/BMS-945429, CNTO 136, CPSI-2364, CDP6038, VX30, ARGX-109, FE301, and FM101. In one embodiment, the anti-IL-6 receptor antibody molecule is tocilizumab. An example of an IL-1R based inhibitor is anakinra.

[0860] In one embodiment, the subject can be administered an agent which enhances the activity of a CAR-expressing cell. For example, in one embodiment, the agent can be an agent which inhibits an inhibitory molecule. Inhibitory molecules, e.g., Programmed Death 1 (PD-1), can, in some embodiments, decrease the ability of a CAR-expressing cell to mount an immune effector response. Examples of inhibitory molecules include PD-1, PD-L1, CTLA-4, TIM-3, CEACAM (e.g., CEACAM-1, CEACAM-3 and/or CEACAM-5), LAG-3, VISTA, BTLA, TIGIT, LAIR1, CD160, 2B4 and TGF beta. Inhibition of an inhibitory molecule, e.g., by inhibition at the DNA, RNA or protein level, can optimize a CAR-expressing cell performance. In embodiments, an inhibitory nucleic acid, e.g., an inhibitory nucleic acid, e.g., a dsRNA, e.g., an siRNA or shRNA, a clustered regularly interspaced short palindromic repeats (CRISPR), a transcription-activator like effector nuclease (TALEN), or a zinc finger endonuclease (ZFN), e.g., as described herein, can be used to inhibit expression of an inhibitory molecule in the CAR-expressing cell. In an embodiment the inhibitor is an shRNA. In an embodiment, the inhibitory molecule is inhibited within a CAR-expressing cell. In these embodiments, a dsRNA molecule that inhibits expression of the inhibitory molecule is linked to the nucleic acid that encodes a component, e.g., all of the components, of the CAR. In one embodiment, the inhibitor of an inhibitory signal can be, e.g., an antibody or antibody fragment that binds to an inhibitory molecule. For example, the agent can be an antibody or antibody fragment that binds to PD-1, PD-L1, PD-L2 or CTLA4 (e.g., ipilimumab (also referred to as MDX-010 and MDX-101, and marketed as Yervoy®; Bristol-Myers Squibb; Tremelimumab (IgG2 monoclonal antibody available from Pfizer, formerly known as ticilimumab, CP-675,206).). In an embodiment, the agent is an antibody or antibody fragment that binds to TIM3. In an embodiment, the agent is an antibody or antibody fragment that binds to CEACAM (CEACAM-1, CEACAM-3, and/or CEACAM-5). In an embodiment, the agent is an antibody or antibody fragment that binds to LAG3.

[0861] PD-1 is an inhibitory member of the CD28 family of receptors that also includes CD28, CTLA-4, ICOS, and BTLA. PD-1 is expressed on activated B cells, T cells and myeloid cells (Agata et al. 1996 Int. Immunol 8:765-75). Two ligands for PD-1, PD-L1 and PD-L2 have been shown to downregulate T cell activation upon binding to PD-1 (Freeman et a. 2000 J Exp Med 192:1027-34; Latchman et al. 2001 Nat Immunol 2:261-8; Carter et al. 2002 Eur J Immunol 32:634-43). PD-L1 is abundant in human cancers (Dong et al. 2003 J Mol Med 81:281-7; Blank et al. 2005 Cancer Immunol. Immunother 54:307-314; Konishi et al. 2004 Clin Cancer Res 10:5094). Immune suppression can be reversed by inhibiting the local interaction of PD-1 with PD-L1. Antibodies, antibody fragments, and other inhibitors of PD-1, PD-L1 and PD-L2 are available in the art and may be used combination with a cars of the present invention described herein. For example, nivolumab (also referred to as BMS-936558 or MDX1106; Bristol-Myers Squibb) is a fully human IgG4 monoclonal antibody which specifically blocks PD-1. Nivolumab (clone 5C4) and other human monoclonal antibodies that specifically bind to PD-1 are disclosed in U.S. Pat. No. 8,008,449 and WO2006/121168. Pidilizumab (CT-011; Cure Tech) is a humanized IgG1k monoclonal antibody that binds to PD-1. Pidilizumab and other humanized anti-PD-1 monoclonal antibodies are disclosed in WO2009/101611. Pembrolizumab (formerly known as lambrolizumab, and also referred to as MK03475; Merck) is a humanized IgG4 monoclonal antibody that binds to PD-1. Pembrolizumab and other humanized anti-PD-1 antibodies are disclosed in U.S. Pat. No. 8,354,509 and WO2009/114335. MEDI4736 (Medimmune) is a human monoclonal antibody that binds to PDL1, and inhibits interaction of the ligand with PD1. MDPL3280A (Genentech/Roche) is a human Fc optimized IgG1 monoclonal antibody that binds to PD-L1. MDPL3280A and other human monoclonal antibodies to PD-L1 are disclosed in U.S. Pat. No. 7,943,743 and U.S Publication No.: 20120039906. Other anti-PD-L1 binding agents include YW243.55.S70 (heavy and light chain variable regions are shown in SEQ ID NOs 20 and 21 in WO2010/077634) and MDX-1 105 (also referred to as BMS-936559, and, e.g., anti-PD-L1 binding agents disclosed in WO2007/005874). AMP-224 (B7-DCIg; Amplimmune; e.g., disclosed in WO2010/027827 and WO2011/066342), is a PD-L2 Fc fusion soluble receptor that blocks the interaction between PD-1 and B7-H1. Other anti-PD-1 antibodies include AMP 514 (Amplimmune), among others, e.g., anti-PD-1 antibodies disclosed in U.S. Pat. No. 8,609,089, US 2010028330, and/or US 20120114649.

[0862] TIM-3 (T cell immunoglobulin-3) also negatively regulates T cell function, particularly in IFN-g-secreting CD4+ T helper 1 and CD8+ T cytotoxic 1 cells, and plays a critical role in T cell exhaustion. Inhibition of the interaction between TIM3 and its ligands, e.g., galectin-9 (Gal9), phosphotidylserine (PS), and HMGB1, can increase immune response. Antibodies, antibody fragments, and other inhibitors of TIM3 and its ligands are available in the art and may be used combination with a CD19 CAR described herein. For example, antibodies, antibody fragments, small molecules, or peptide inhibitors that target TIM3 binds to the IgV domain of TIM3 to inhibit interaction with its ligands. Antibodies and peptides that inhibit TIM3 are disclosed in WO2013/006490 and US20100247521. Other anti-TIM3 antibodies include humanized versions of RMT3-23 (disclosed in Ngiow et al., 2011, Cancer Res, 71:3540-3551), and clone 8B.2C12 (disclosed in Monney et al., 2002, Nature, 415:536-541). Bi-specific antibodies that inhibit TIM3 and PD-1 are disclosed in US20130156774.

[0863] In other embodiments, the agent that enhances the activity of a CAR-expressing cell is a CEACAM inhibitor (e.g., CEACAM-1, CEACAM-3, and/or CEACAM-5 inhibitor). In one embodiment, the inhibitor of CEACAM is an anti-CEACAM antibody molecule. Exemplary anti-CEACAM-1 antibodies are described in WO 2010/125571, WO 2013/082366 WO 2014/059251 and WO 2014/022332, e.g., a monoclonal antibody 34B1, 26H7, and 5F4; or a recombinant form thereof, as described in, e.g., US 2004/0047858, U.S. Pat. No. 7,132,255 and WO 99/052552. In other embodiments, the anti-CEACAM antibody binds to CEACAM-5 as described in, e.g., Zheng et al. PLoS One. 2010 Sep. 2; 5(9). pii: e12529 (DOI:10:1371/journal.pone.0021146), or crossreacts with CEACAM-1 and CEACAM-5 as described in, e.g., WO 2013/054331 and US 2014/0271618.

[0864] Without wishing to be bound by theory, carcinoembryonic antigen cell adhesion molecules (CEACAM), such as CEACAM-1 and CEACAM-5, are believed to mediate, at least in part, inhibition of an anti-tumor immune response (see e.g., Markel et al. J Immunol. 2002 Mar. 15; 168(6):2803-10; Markel et al. J Immunol. 2006 Nov. 1; 177(9):6062-71; Markel et al. Immunology. 2009 February; 126(2):186-200; Markel et al. Cancer Immunol Immunother. 2010 Feb.; 59(2):215-30; Ortenberg et al. Mol Cancer Ther. 2012 Jun.; 11(6):1300-10; Stern et al. J Immunol. 2005 Jun. 1; 174(11):6692-701; Zheng et al. PLoS One. 2010 Sep. 2; 5(9). pii: e12529). For example, CEACAM-1 has been described as a heterophilic ligand for TIM-3 and as playing a role in TIM-3-mediated T cell tolerance and exhaustion (see e.g., WO 2014/022332; Huang, et al. (2014) Nature doi:10.1038/nature13848). In embodiments, co-blockade of CEACAM-1 and TIM-3 has been shown to enhance an anti-tumor immune response in xenograft colorectal cancer models (see e.g., WO 2014/022332; Huang, et al. (2014), supra). In other embodiments, co-blockade of CEACAM-1 and PD-1 reduce T cell tolerance as described, e.g., in WO 2014/059251. Thus, CEACAM inhibitors can be used with the other immunomodulators described herein (e.g., anti-PD-1 and/or anti-TIM-3 inhibitors) to enhance an immune response against a cancer, e.g., a melanoma, a lung cancer (e.g., NSCLC), a bladder cancer, a colon cancer an ovarian cancer, and other cancers as described herein.

[0865] LAG-3 (lymphocyte activation gene-3 or CD223) is a cell surface molecule expressed on activated T cells and B cells that has been shown to play a role in CD8+ T cell exhaustion. Antibodies, antibody fragments, and other inhibitors of LAG-3 and its ligands are available in the art and may be used combination with a CD19 CAR described herein. For example, BMS-986016 (Bristol-Myers Squib) is a monoclonal antibody that targets LAG3. IMP701 (Immutep) is an antagonist LAG-3 antibody and IMP731 (Immutep and GlaxoSmithKline) is a depleting LAG-3 antibody. Other LAG-3 inhibitors include IMP321 (Immutep), which is a recombinant fusion protein of a soluble portion of LAG3 and Ig that binds to MHC class II molecules and activates antigen presenting cells (APC). Other antibodies are disclosed, e.g., in WO2010/019570.

[0866] In some embodiments, the agent which enhances the activity of a CAR-expressing cell can be, e.g., a fusion protein comprising a first domain and a second domain, wherein the first domain is an inhibitory molecule, or fragment thereof, and the second domain is a polypeptide that is associated with a positive signal, e.g., a polypeptide comprising an antracellular signaling domain as described herein. In some embodiments, the polypeptide that is associated with a positive signal can include a costimulatory domain of CD28, CD27, ICOS, e.g., an intracellular signaling domain of CD28, CD27 and/or ICOS, and/or a primary signaling domain, e.g., of CD3 zeta, e.g., described herein. In one embodiment, the fusion protein is expressed by the same cell that expressed the CAR. In another embodiment, the fusion protein is expressed by a cell, e.g., a T cell that does not express a CAR of the present invention.

[0867] In one embodiment, the agent which enhances activity of a CAR-expressing cell described herein is miR-17-92.

[0868] In one embodiment, the agent which enhances activity of a CAR-described herein is a cytokine. Cytokines have important functions related to T cell expansion, differentiation, survival, and homeostatis. Cytokines that can be administered to the subject receiving a CAR-expressing cell described herein include: IL-2, IL-4, IL-7, IL-9, IL-15, IL-18, and IL-21, or a combination thereof. In preferred embodiments, the cytokine administered is IL-7, IL-15, or IL-21, or a combination thereof. The cytokine can be administered once a day or more than once a day, e.g., twice a day, three times a day, or four times a day. The cytokine can be administered for more than one day, e.g. the cytokine is administered for 2 days, 3 days, 4 days, 5 days, 6 days, 1 week, 2 weeks, 3 weeks, or 4 weeks. For example, the cytokine is administered once a day for 7 days.

[0869] In embodiments, the cytokine is administered in combination with CAR-expressing T cells. The cytokine can be administered simultaneously or concurrently with the CAR-expressing T cells, e.g., administered on the same day. The cytokine may be prepared in the same pharmaceutical composition as the CAR-expressing T cells, or may be prepared in a separate pharmaceutical composition. Alternatively, the cytokine can be administered shortly after administration of the CAR-expressing T cells, e.g., 1 day, 2 days, 3 days, 4 days, 5 days, 6 days, or 7 days after administration of the CAR-expressing T cells. In embodiments where the cytokine is administered in a dosing regimen that occurs over more than one day, the first day of the cytokine dosing regimen can be on the same day as administration with the CAR-expressing T cells, or the first day of the cytokine dosing regimen can be 1 day, 2 days, 3 days, 4 days, 5 days, 6 days, or 7 days after administration of the CAR-expressing T cells. In one embodiment, on the first day, the CAR-expressing T cells are administered to the subject, and on the second day, a cytokine is administered once a day for the next 7 days. In a preferred embodiment, the cytokine to be administered in combination with CAR-expressing T cells is IL-7, IL-15, or IL-21.

[0870] In other embodiments, the cytokine is administered a period of time after administration of CAR-expressing cells, e.g., at least 2 weeks, 3 weeks, 4 weeks, 6 weeks, 8 weeks, 10 weeks, 12 weeks, 4 months, 5 months, 6 months, 7 months, 8 months, 9 months, 10 months, 11 months, or 1 year or more after administration of CAR-expressing cells. In one embodiment, the cytokine is administered after assessment of the subject's response to the CAR-expressing cells. For example, the subject is administered CAR-expressing cells according to the dosage and regimens described herein. The response of the subject to CAR-expressing cell therapy is assessed at 2 weeks, 3 weeks, 4 weeks, 6 weeks, 8 weeks, 10 weeks, 12 weeks, 4 months, 5 months, 6 months, 7 months, 8 months, 9 months, 10 months, 11 months, or 1 year or more after administration of CAR-expressing cells, using any of the methods described herein, including inhibition of tumor growth, reduction of circulating tumor cells, or tumor regression. Subjects that do not exhibit a sufficient response to CAR-expressing cell therapy can be administered a cytokine. Administration of the cytokine to the subject that has sub-optimal response to the CAR-expressing cell therapy improves CAR-expressing cell efficacy or anti-cancer activity. In a preferred embodiment, the cytokine administered after administration of CAR-expressing cells is IL-7.

[0871] Combination with a Low Dose of an mTOR Inhibitor

[0872] In one embodiment, the cells expressing a CAR molecule, e.g., a CAR molecule described herein, are administered in combination with a low, immune enhancing dose of an mTOR inhibitor.

[0873] In an embodiment, a dose of an mTOR inhibitor is associated with, or provides, mTOR inhibition of at least 5 but no more than 90%, at least 10 but no more than 90%, at least 15, but no more than 90%, at least 20 but no more than 90%, at least 30 but no more than 90%, at least 40 but no more than 90%, at least 50 but no more than 90%, at least 60 but no more than 90%, or at least 70 but no more than 90%.

[0874] In an embodiment, a dose of an mTOR inhibitor is associated with, or provides, mTOR inhibition of at least 5 but no more than 80%, at least 10 but no more than 80%, at least 15, but no more than 80%, at least 20 but no more than 80%, at least 30 but no more than 80%, at least 40 but no more than 80%, at least 50 but no more than 80%, or at least 60 but no more than 80%.

[0875] In an embodiment, a dose of an mTOR inhibitor is associated with, or provides, mTOR inhibition of at least 5 but no more than 70%, at least 10 but no more than 70%, at least 15, but no more than 70%, at least 20 but no more than 70%, at least 30 but no more than 70%, at least 40 but no more than 70%, or at least 50 but no more than 70%.

[0876] In an embodiment, a dose of an mTOR inhibitor is associated with, or provides, mTOR inhibition of at least 5 but no more than 60%, at least 10 but no more than 60%, at least 15, but no more than 60%, at least 20 but no more than 60%, at least 30 but no more than 60%, or at least 40 but no more than 60%.

[0877] In an embodiment, a dose of an mTOR inhibitor is associated with, or provides, mTOR inhibition of at least 5 but no more than 50%, at least 10 but no more than 50%, at least 15, but no more than 50%, at least 20 but no more than 50%, at least 30 but no more than 50%, or at least 40 but no more than 50%.

[0878] In an embodiment, a dose of an mTOR inhibitor is associated with, or provides, mTOR inhibition of at least 5 but no more than 40%, at least 10 but no more than 40%, at least 15, but no more than 40%, at least 20 but no more than 40%, at least 30 but no more than 40%, or at least 35 but no more than 40%.

[0879] In an embodiment, a dose of an mTOR inhibitor is associated with, or provides, mTOR inhibition of at least 5 but no more than 30%, at least 10 but no more than 30%, at least 15, but no more than 30%, at least 20 but no more than 30%, or at least 25 but no more than 30%.

[0880] In an embodiment, a dose of an mTOR inhibitor is associated with, or provides, mTOR inhibition of at least 1, 2, 3, 4 or 5 but no more than 20%, at least 1, 2, 3, 4 or 5 but no more than 30%, at least 1, 2, 3, 4 or 5, but no more than 35, at least 1, 2, 3, 4 or 5 but no more than 40%, or at least 1, 2, 3, 4 or 5 but no more than 45%.

[0881] In an embodiment, a dose of an mTOR inhibitor is associated with, or provides, mTOR inhibition of at least 1, 2, 3, 4 or 5 but no more than 90%.

[0882] As is discussed herein, the extent of mTOR inhibition can be expressed as the extent of P70 S6 kinase inhibition, e.g., the extent of mTOR inhibition can be determined by the level of decrease in P70 S6 kinase activity, e.g., by the decrease in phosphorylation of a P70 S6 kinase substrate. The level of mTOR inhibition can be evaluated by a method described herein, e.g. by the Boulay assay, or measurement of phosphorylated S6 levels by western blot.

[0883] Exemplary mTOR Inhibitors

[0884] As used herein, the term “mTOR inhibitor” refers to a compound or ligand, or a pharmaceutically acceptable salt thereof, which inhibits the mTOR kinase in a cell. In an embodiment an mTOR inhibitor is an allosteric inhibitor. In an embodiment an mTOR inhibitor is a catalytic inhibitor.

[0885] Allosteric mTOR inhibitors include the neutral tricyclic compound rapamycin (sirolimus), rapamycin-related compounds, that is compounds having structural and functional similarity to rapamycin including, e.g., rapamycin derivatives, rapamycin analogs (also referred to as rapalogs) and other macrolide compounds that inhibit mTOR activity.

[0886] Rapamycin is a known macrolide antibiotic produced by Streptomyces hygroscopicus having the structure shown in Formula A.

[chemical structure]

[0887] See, e.g., McAlpine, J. B., et al., J. Antibiotics (1991) 44: 688; Schreiber, S. L., et al., J. Am. Chem. Soc. (1991) 113: 7433; U.S. Pat. No. 3,929,992. There are various numbering schemes proposed for rapamycin. To avoid confusion, when specific rapamycin analogs are named herein, the names are given with reference to rapamycin using the numbering scheme of formula A.

[0888] Rapamycin analogs useful in the invention are, for example, 0-substituted analogs in which the hydroxyl group on the cyclohexyl ring of rapamycin is replaced by OR₁ in which R₁ is hydroxyalkyl, hydroxyalkoxyalkyl, acylaminoalkyl, or aminoalkyl; e.g. RAD001, also known as, everolimus as described in U.S. Pat. No. 5,665,772 and WO94/09010 the contents of which are incorporated by reference. Other suitable rapamycin analogs include those substituted at the 26- or 28-position. The rapamycin analog may be an epimer of an analog mentioned above, particularly an epimer of an analog substituted in position 40, 28 or 26, and may optionally be further hydrogenated, e.g. as described in U.S. Pat. No. 6,015,815, WO95/14023 and WO99/15530 the contents of which are incorporated by reference, e.g. ABT578 also known as zotarolimus or a rapamycin analog described in U.S. Pat. No. 7,091,213, WO98/02441 and WO01/14387 the contents of which are incorporated by reference, e.g. AP23573 also known as ridaforolimus.

[0889] Examples of rapamycin analogs suitable for use in the present invention from U.S. Pat. No. 5,665,772 include, but are not limited to, 40-O-benzyl-rapamycin, 40-O-(4′-hydroxymethyl)benzyl-rapamycin, 40-O-[4′-(1,2-dihydroxyethyl)]benzyl-rapamycin, 40-O-allyl-rapamycin, 40-O-[3′-(2,2-dimethyl-1,3-dioxolan-4(S)-yl)-prop-2′-en-1′-yl]-rapamycin, (2′E,4'S)-40-O-(4′,5′-dihydroxypent-2′-en-1′-yl)-rapamycin, 40-O-(2-hydroxy)ethoxycarbonylmethyl-rapamycin, 40-O-(2-hydroxy)ethyl-rapamycin, 40-O-(3-hydroxy)propyl-rapamycin, 40-O-(6-hydroxy)hexyl-rapamycin, 40-O-[2-(2-hydroxy)ethoxy]ethyl-rapamycin, 40-O-[(3S)-2,2-dimethyldioxolan-3-yl]methyl-rapamycin, 40-O-[(2S)-2,3-dihydroxyprop-1-yl]-rapamycin, 40-O-(2-acetoxy)ethyl-rapamycin, 40-O-(2-nicotinoyloxy)ethyl-rapamycin, 40-O-[2-(N-morpholino)acetoxy]ethyl-rapamycin, 40-O-(2-N-imidazolylacetoxy)ethyl-rapamycin, 40-O-[2-(N-methyl-N′-piperazinyl)acetoxy]ethyl-rapamycin, 39-O-desmethyl-39,40-O,O-ethylene-rapamycin, (26R)-26-dihydro-40-O-(2-hydroxy)ethyl-rapamycin, 40-O-(2-aminoethyl)-rapamycin, 40-O-(2-acetaminoethyl)-rapamycin, 40-O-(2-nicotinamidoethyl)-rapamycin, 40-O-(2-(N-methyl-imidazo-2′-ylcarbethoxamido)ethyl)-rapamycin, 40-O-(2-ethoxycarbonylaminoethyl)-rapamycin, 40-O-(2-tolylsulfonamidoethyl)-rapamycin and 40-O-[2-(4′,5′-dicarboethoxy-1′,2′,3′-triazol-1′-yl)-ethyl]-rapamycin.

[0890] Other rapamycin analogs useful in the present invention are analogs where the hydroxyl group on the cyclohexyl ring of rapamycin and/or the hydroxy group at the 28 position is replaced with an hydroxyester group are known, for example, rapamycin analogs found in U.S. RE44,768, e.g. temsirolimus.

[0891] Other rapamycin analogs useful in the preset invention include those wherein the methoxy group at the 16 position is replaced with another substituent, preferably (optionally hydroxy-substituted) alkynyloxy, benzyl, orthomethoxybenzyl or chlorobenzyl and/or wherein the mexthoxy group at the 39 position is deleted together with the 39 carbon so that the cyclohexyl ring of rapamycin becomes a cyclopentyl ring lacking the 39 position methyoxy group; e.g. as described in WO95/16691 and WO96/41807 the contents of which are incorporated by reference. The analogs can be further modified such that the hydroxy at the 40-position of rapamycin is alkylated and/or the 32-carbonyl is reduced.

[0892] Rapamycin analogs from WO95/16691 include, but are not limited to, 16-demthoxy-16-(pent-2-ynyl)oxy-rapamycin, 16-demthoxy-16-(but-2-ynyl)oxy-rapamycin, 16-demthoxy-16-(propargyl)oxy-rapamycin, 16-demethoxy-16-(4-hydroxy-but-2-ynyl)oxy-rapamycin, 16-demthoxy-16-benzyloxy-40-O-(2-hydroxyethyl)-rapamycin, 16-demthoxy-16-benzyloxy-rapamycin, 16-demethoxy-16-ortho-methoxybenzyl-rapamycin, 16-demethoxy-40-O-(2-methoxyethyl)-16-pent-2-ynyl)oxy-rapamycin, 39-demethoxy-40-desoxy-39-formyl-42-nor-rapamycin, 39-demethoxy-40-desoxy-39-hydroxymethyl-42-nor-rapamycin, 39-demethoxy-40-desoxy-39-carboxy-42-nor-rapamycin, 39-demethoxy-40-desoxy-39-(4-methyl-piperazin-1-yl)carbonyl-42-nor-rapamycin, 39-demethoxy-40-desoxy-39-(morpholin-4-yl)carbonyl-42-nor-rapamycin, 39-demethoxy-40-desoxy-39-[N-methyl, N-(2-pyridin-2-yl-ethyl)]carbamoyl-42-nor-rapamycin and 39-demethoxy-40-desoxy-39-(p-toluenesulfonylhydrazonomethyl)-42-nor-rapamycin.

[0893] Rapamycin analogs from WO96/41807 include, but are not limited to, 32-deoxo-rapamycin, 16-O-pent-2-ynyl-32-deoxo-rapamycin, 16-O-pent-2-ynyl-32-deoxo-40-O-(2-hydroxy-ethyl)-rapamycin, 16-O-pent-2-ynyl-32-(S)-dihydro-40-O-(2-hydroxyethyl)-rapamycin, 32(S)-dihydro-40-O-(2-methoxy)ethyl-rapamycin and 32(S)-dihydro-40-O-(2-hydroxyethyl)-rapamycin.

[0894] Another suitable rapamycin analog is umirolimus as described in US2005/0101624 the contents of which are incorporated by reference.

[0895] RAD001, otherwise known as everolimus (Afinitor®), has the chemical name (1R,9S,12S,15R,16E,18R,19R,21R,23S,24E,26E,28E,30S,32S,35R)-1,18-dihydroxy-12-{(1R)-2-[(1S,3R,4R)-4-(2-hydroxyethoxy)-3-methoxycyclohexyl]-1-methylethyl}-19,30-dimethoxy-15,17,21,23,29,35-hexamethyl-11,36-dioxa-4-aza-tricyclo[30.3.1.0^{4,9}]hexatriaconta-16,24,26,28-tetraene-2,3,10,14,20-pentaone

[0896] Further examples of allosteric mTOR inhibitors include sirolimus (rapamycin, AY-22989), 40-[3-hydroxy-2-(hydroxymethyl)-2-methylpropanoate]-rapamycin (also called temsirolimus or CCI-779) and ridaforolimus (AP-23573/MK-8669). Other examples of allosteric mTor inhibitors include zotarolimus (ABT578) and umirolimus.

[0897] Alternatively or additionally, catalytic, ATP-competitive mTOR inhibitors have been found to target the mTOR kinase domain directly and target both mTORC1 and mTORC2. These are also more effective inhibitors of mTORC1 than such allosteric mTOR inhibitors as rapamycin, because they modulate rapamycin-resistant mTORC1 outputs such as 4EBP1-T37/46 phosphorylation and cap-dependent translation.

[0898] Catalytic inhibitors include: BEZ235 or 2-methyl-2-[4-(3-methyl-2-oxo-8-quinolin-3-yl-2,3-dihydro-imidazo[4,5-c]quinolin-1-yl)-phenyl]-propionitrile, or the monotosylate salt form. the synthesis of BEZ235 is described in WO2006/122806; CCG168 (otherwise known as AZD-8055, Chresta, C. M., et al., Cancer Res, 2010, 70(1), 288-298) which has the chemical name {5-[2,4-bis-((S)-3-methyl-morpholin-4-yl)-pyrido[2,3d]pyrimidin-7-yl]-2-methoxy-phenyl}-methanol; 3-[2,4-bis[(3S)-3-methylmorpholin-4-yl]pyrido[2,3-d]pyrimidin-7-yl]-N-methylbenzamide (WO09104019); 3-(2-aminobenzo[d]oxazol-5-yl)-1-isopropyl-1H-pyrazolo[3,4-d]pyrimidin-4-amine (WO10051043 and WO2013023184); A N-(3-(N-(3-((3,5-dimethoxyphenyl)amino)quinoxaline-2-yl)sulfamoyl)phenyl)-3-methoxy-4-methylbenzamide (WO07044729 and WO12006552); PKI-587 (Venkatesan, A. M., J. Med.Chem., 2010, 53, 2636-2645) which has the chemical name 1-[4-[4-(dimethylamino)piperidine-1-carbonyl]phenyl]-3-[4-(4,6-dimorpholino-1,3,5-triazin-2-yl)phenyl]urea; GSK-2126458 (ACS Med. Chem. Lett., 2010, 1, 39-43) which has the chemical name 2,4-difluoro-N-{2-methoxy-5-[4-(4-pyridazinyl)-6-quinolinyl]-3-pyridinyl}benzenesulfonamide; 5-(9-isopropyl-8-methyl-2-morpholino-9H-purin-6-yl)pyrimidin-2-amine (WO10114484); (E)-N-(8-(6-amino-5-(trifluoromethyl)pyridin-3-yl)-1-(6-(2-cyanopropan-2-yl)pyridin-3-yl)-3-methyl-1H-imidazo[4,5-c]quinolin-2(3H)-ylidene)cyanamide (WO12007926).

[0899] Further examples of catalytic mTOR inhibitors include 8-(6-methoxy-pyridin-3-yl)-3-methyl-1-(4-piperazin-1-yl-3-trifluoromethyl-phenyl)-1,3-dihydro-imidazo[4,5-c]quinolin-2-one (WO2006/122806) and Ku-0063794 (Garcia-Martinez J M, et al., Biochem J., 2009, 421(1), 29-42. Ku-0063794 is a specific inhibitor of the mammalian target of rapamycin (mTOR).) WYE-354 is another example of a catalytic mTor inhibitor (Yu K, et al. (2009). Biochemical, Cellular, and In vivo Activity of Novel ATP-Competitive and Selective Inhibitors of the Mammalian Target of Rapamycin. Cancer Res. 69(15): 6232-6240).

[0900] mTOR inhibitors useful according to the present invention also include prodrugs, derivatives, pharmaceutically acceptable salts, or analogs thereof of any of the foregoing.

[0901] mTOR inhibitors, such as RAD001, may be formulated for delivery based on well-established methods in the art based on the particular dosages described herein. In particular, U.S. Pat. No. 6,004,973 (incorporated herein by reference) provides examples of formulations useable with the mTOR inhibitors described herein.

[0902] Evaluation of mTOR Inhibition

[0903] mTOR phosphorylates the kinase P70 S6, thereby activating P70 S6 kinase and allowing it to phosphorylate its substrate. The extent of mTOR inhibition can be expressed as the extent of P70 S6 kinase inhibition, e.g., the extent of mTOR inhibition can be determined by the level of decrease in P70 S6 kinase activity, e.g., by the decrease in phosphorylation of a P70 S6 kinase substrate. One can determine the level of mTOR inhibition, by measuring P70 S6 kinase activity (the ability of P70 S6 kinase to phsophorylate a substrate), in the absence of inhibitor, e.g., prior to administration of inhibitor, and in the presences of inhibitor, or after the administration of inhibitor. The level of inhibition of P70 S6 kinase gives the level of mTOR inhibition. Thus, if P70 S6 kinase is inhibited by 40%, mTOR activity, as measured by P70 S6 kinase activity, is inhibited by 40%. The extent or level of inhibition referred to herein is the average level of inhibition over the dosage interval. By way of example, if the inhibitor is given once per week, the level of inhibition is given by the average level of inhibition over that interval, namely a week.

[0904] Boulay et al., Cancer Res, 2004, 64:252-61, hereby incorporated by reference, teaches an assay that can be used to assess the level of mTOR inhibition (referred to herein as the Boulay assay). In an embodiment, the assay relies on the measurement of P70 S6 kinase activity from biological samples before and after administration of an mTOR inhibitor, e.g., RAD001. Samples can be taken at preselected times after treatment with an mTOR inhibitor, e.g., 24, 48, and 72 hours after treatment. Biological samples, e.g., from skin or peripheral blood mononuclear cells (PBMCs) can be used. Total protein extracts are prepared from the samples. P70 S6 kinase is isolated from the protein extracts by immunoprecipitation using an antibody that specifically recognizes the P70 S6 kinase. Activity of the isolated P70 S6 kinase can be measured in an in vitro kinase assay. The isolated kinase can be incubated with 40S ribosomal subunit substrates (which is an endogenous substrate of P70 S6 kinase) and gamma-³²P under conditions that allow phosphorylation of the substrate. Then the reaction mixture can be resolved on an SDS-PAGE gel, and ³²P signal analyzed using a Phosphorlmager. A ³²P signal corresponding to the size of the 40S ribosomal subunit indicates phosphorylated substrate and the activity of P70 S6 kinase. Increases and decreases in kinase activity can be calculated by quantifying the area and intensity of the ³²P signal of the phosphorylated substrate (e.g., using ImageQuant, Molecular Dynamics), assigning arbitrary unit values to the quantified signal, and comparing the values from after administration with values from before administration or with a reference value. For example, percent inhibition of kinase activity can be calculated with the following formula: 1-(value obtained after administration/value obtained before administration)×100. As described above, the extent or level of inhibition referred to herein is the average level of inhibition over the dosage interval.

[0905] Methods for the evaluation of kinase activity, e.g., P70 S6 kinase activity, are also provided in U.S. Pat. No. 7,727,950, hereby incorporated by reference.

[0906] The level of mTOR inhibition can also be evaluated by a change in the ration of PD1 negative to PD1 positive T cells. T cells from peripheral blood can be identified as PD1 negative or positive by art-known methods.

[0907] Low-Dose mTOR Inhibitors

[0908] Methods described herein use low, immune enhancing, dose mTOR inhibitors, doses of mTOR inhibitors, e.g., allosteric mTOR inhibitors, including rapalogs such as RAD001. In contrast, levels of inhibitor that fully or near fully inhibit the mTOR pathway are immunosuppressive and are used, e.g., to prevent organ transplant rejection. In addition, high doses of rapalogs that fully inhibit mTOR also inhibit tumor cell growth and are used to treat a variety of cancers (See, e.g., Antineoplastic effects of mammalian target of rapamycine inhibitors. Salvadori M. World J Transplant. 2012 Oct. 24; 2(5):74-83; Current and Future Treatment Strategies for Patients with Advanced Hepatocellular Carcinoma: Role of mTOR Inhibition. Finn RS. Liver Cancer. 2012 Nov.; 1(3-4):247-256; Emerging Signaling Pathways in Hepatocellular Carcinoma. Moeini A, Cornella H, Villanueva A. Liver Cancer. 2012 Sep.; 1(2):83-93; Targeted cancer therapy—Are the days of systemic chemotherapy numbered?Joo W D, Visintin I, Mor G. Maturitas. 2013 Sep. 20.; Role of natural and adaptive immunity in renal cell carcinoma response to VEGFR-TKIs and mTOR inhibitor. Santoni M, Berardi R, Amantini C, Burattini L, Santini D, Santoni G, Cascinu S. Int J Cancer. 2013 Oct. 2).

[0909] The present invention is based, at least in part, on the surprising finding that doses of mTOR inhibitors well below those used in current clinical settings had a superior effect in increasing an immune response in a subject and increasing the ratio of PD-1 negative T cells/PD-1 positive T cells. It was surprising that low doses of mTOR inhibitors, producing only partial inhibition of mTOR activity, were able to effectively improve immune responses in human human subjects and increase the ratio of PD-1 negative T cells/PD-1 positive T cells.

[0910] Alternatively, or in addition, without wishing to be bound by any theory, it is believed that low, a low, immune enhancing, dose of an mTOR inhibitor can increase naive T cell numbers, e.g., at least transiently, e.g., as compared to a non-treated subject. Alternatively or additionally, again while not wishing to be bound by theory, it is believed that treatment with an mTOR inhibitor after a sufficient amount of time or sufficient dosing results in one or more of the following:
[0911] an increase in the expression of one or more of the following markers: CD62^{high} CD127^{high}, CD27+, and BCL2, e.g., on memory T cells, e.g., memory T cell precursors;
[0912] a decrease in the expression of KLRG1, e.g., on memory T cells, e.g., memory T cell precursors; and
[0913] an increase in the number of memory T cell precursors, e.g., cells with any one or combination of the following characteristics: increased CD62^{high} increased CD127^{high} increased CD27+, decreased KLRG1, and increased BCL2;
[0914] and wherein any of the changes described above occurs, e.g., at least transiently, e.g., as compared to a non-treated subject (Araki, K et al. (2009) Nature 460:108-112). Memory T cell precursors are memory T cells that are early in the differentiation program. For example, memory T cells have one or more of the following characteristics: increased CD62L^{high}, increased CD127^{high}, increased CD27⁺, decreased KLRG1, and/or increased BCL2.

[0915] In an embodiment, the invention relates to a composition, or dosage form, of an mTOR inhibitor, e.g., an allosteric mTOR inhibitor, e.g., a rapalog, rapamycin, or RAD001, or a catalytic mTOR inhibitor, which, when administered on a selected dosing regimen, e.g., once daily or once weekly, is associated with: a level of mTOR inhibition that is not associated with complete, or significant immune suppression, but is associated with enhancement of the immune response.

[0916] An mTOR inhibitor, e.g., an allosteric mTOR inhibitor, e.g., a rapalog, rapamycin, or RAD001, or a catalytic mTOR inhibitor, can be provided in a sustained release formulation. Any of the compositions or unit dosage forms described herein can be provided in a sustained release formulation. In some embodiments, a sustained release formulation will have lower bioavailability than an immediate release formulation. E.g., in embodiments, to attain a similar therapeutic effect of an immediate release formulation a sustained release formulation will have from about 2 to about 5, about 2.5 to about 3.5, or about 3 times the amount of inhibitor provided in the immediate release formulation.

[0917] In an embodiment, immediate release forms, e.g., of RAD001, typically used for one administration per week, having 0.1 to 20, 0.5 to 10, 2.5 to 7.5, 3 to 6, or about 5, mgs per unit dosage form, are provided. For once per week administrations, these immediate release formulations correspond to sustained release forms, having, respectively, 0.3 to 60, 1.5 to 30, 7.5 to 22.5, 9 to 18, or about 15 mgs of an mTOR inhibitor, e.g., an allosteric mTOR inhibitor, e.g., rapamycin or RAD001. In embodiments both forms are administered on a once/week basis.

[0918] In an embodiment, immediate release forms, e.g., of RAD001, typically used for one administration per day, having 0.005 to 1.5, 0.01 to 1.5, 0.1 to 1.5, 0.2 to 1.5, 0.3 to 1.5, 0.4 to 1.5, 0.5 to 1.5, 0.6 to 1.5, 0.7 to 1.5, 0.8 to 1.5, 1.0 to 1.5, 0.3 to 0.6, or about 0.5 mgs per unit dosage form, are provided. For once per day administrations, these immediate release forms correspond to sustained release forms, having, respectively, 0.015 to 4.5, 0.03 to 4.5, 0.3 to 4.5, 0.6 to 4.5, 0.9 to 4.5, 1.2 to 4.5, 1.5 to 4.5, 1.8 to 4.5, 2.1 to 4.5, 2.4 to 4.5, 3.0 to 4.5, 0.9 to 1.8, or about 1.5 mgs of an mTOR inhibitor, e.g., an allosteric mTOR inhibitor, e.g., rapamycin or RAD001. For once per week administrations, these immediate release forms correspond to sustained release forms, having, respectively, 0.1 to 30, 0.2 to 30, 2 to 30, 4 to 30, 6 to 30, 8 to 30, 10 to 30, 1.2 to 30, 14 to 30, 16 to 30, 20 to 30, 6 to 12, or about 10 mgs of an mTOR inhibitor, e.g., an allosteric mTOR inhibitor, e.g., rapamycin or RAD001.

[0919] In an embodiment, immediate release forms, e.g., of RAD001, typically used for one administration per day, having 0.01 to 1.0 mgs per unit dosage form, are provided. For once per day administrations, these immediate release forms correspond to sustained release forms, having, respectively, 0.03 to 3 mgs of an mTOR inhibitor, e.g., an allosteric mTOR inhibitor, e.g., rapamycin or RAD001. For once per week administrations, these immediate release forms correspond to sustained release forms, having, respectively, 0.2 to 20 mgs of an mTOR inhibitor, e.g., an allosteric mTOR inhibitor, e.g., rapamycin or RAD001.

[0920] In an embodiment, immediate release forms, e.g., of RAD001, typically used for one administration per week, having 0.5 to 5.0 mgs per unit dosage form, are provided. For once per week administrations, these immediate release forms correspond to sustained release forms, having, respectively, 1.5 to 15 mgs of an mTOR inhibitor, e.g., an allosteric mTOR inhibitor, e.g., rapamycin or RAD001.

[0921] As described above, one target of the mTOR pathway is the P70 S6 kinase. Thus, doses of mTOR inhibitors which are useful in the methods and compositions described herein are those which are sufficient to achieve no greater than 80% inhibition of P70 S6 kinase activity relative to the activity of the P70 S6 kinase in the absence of an mTOR inhibitor, e.g., as measured by an assay described herein, e.g., the Boulay assay. In a further aspect, the invention provides an amount of an mTOR inhibitor sufficient to achieve no greater than 38% inhibition of P70 S6 kinase activity relative to P70 S6 kinase activity in the absence of an mTOR inhibitor.

[0922] In one aspect the dose of mTOR inhibitor useful in the methods and compositions of the invention is sufficient to achieve, e.g., when administered to a human subject, 90+/−5% (i.e., 85-95%), 89+/−5%, 88+/−5%, 87+/−5%, 86+/−5%, 85+/−5%, 84+/−5%, 83+/−5%, 82+/−5%, 81+/−5%, 80+/−5%, 79+/−5%, 78+/−5%, 77+/−5%, 76+/−5%, 75+/−5%, 74+/−5%, 73+/−5%, 72+/−5%, 71+/−5%, 70+/−5%, 69+/−5%, 68+/−5%, 67+/−5%, 66+/−5%, 65+/−5%, 64+/−5%, 63+/−5%, 62+/−5%, 61+/−5%, 60+/−5%, 59+/−5%, 58+/−5%, 57+/−5%, 56+/−5%, 55+/−5%, 54+/−5%, 54+/−5%, 53+/−5%, 52+/−5%, 51+/−5%, 50+/−5%, 49+/−5%, 48+/−5%, 47+/−5%, 46+/−5%, 45+/−5%, 44+/−5%, 43+/−5%, 42+/−5%, 41+/−5%, 40+/−5%, 39+/−5%, 38+/−5%, 37+/−5%, 36+/−5%, 35+/−5%, 34+/−5%, 33+/−5%, 32+/−5%, 31+/−5%, 30+/−5%, 29+/−5%, 28+/−5%, 27+/−5%, 26+/−5%, 25+/−5%, 24+/−5%, 23+/−5%, 22+/−5%, 21+/−5%, 20+/−5%, 19+/−5%, 18+/−5%, 17+/−5%, 16+/−5%, 15+/−5%, 14+/−5%, 13+/−5%, 12+/−5%, 11+/−5%, or 10 +/−5%, inhibition of P70 S6 kinase activity, e.g., as measured by an assay described herein, e.g., the Boulay assay.

[0923] P70 S6 kinase activity in a subject may be measured using methods known in the art, such as, for example, according to the methods described in U.S. Pat. No. 7,727,950, by immunoblot analysis of phosphoP70 S6K levels and/or phosphoP70 S6 levels or by in vitro kinase activity assays.

[0924] As used herein, the term “about” in reference to a dose of mTOR inhibitor refers to up to a +/−10% variability in the amount of mTOR inhibitor, but can include no variability around the stated dose.

[0925] In some embodiments, the invention provides methods comprising administering to a subject an mTOR inhibitor, e.g., an allosteric inhibitor, e.g., RAD001, at a dosage within a target trough level. In some embodiments, the trough level is significantly lower than trough levels associated with dosing regimens used in organ transplant and cancer patients. In an embodiment mTOR inhibitor, e.g., RAD001, or rapamycin, is administered to result in a trough level that is less than ½, ¼, 1/10, or 1/20 of the trough level that results in immunosuppression or an anticancer effect. In an embodiment mTOR inhibitor, e.g., RAD001, or rapamycin, is administered to result in a trough level that is less than ½, ¼, 1/10, or 1/20 of the trough level provided on the FDA approved packaging insert for use in immunosuppression or an anticancer indications.

[0926] In an embodiment a method disclosed herein comprises administering to a subject an mTOR inhibitor, e.g., an allosteric inhibitor, e.g., RAD001, at a dosage that provides a target trough level of 0.1 to 10 ng/ml, 0.1 to 5 ng/ml, 0.1 to 3 ng/ml, 0.1 to 2 ng/ml, or 0.1 to 1 ng/ml.

[0927] In an embodiment a method disclosed herein comprises administering to a subject an mTOR inhibitor, e.g., an allosteric inhibitor, e.g., RAD001, at a dosage that provides a target trough level of 0.2 to 10 ng/ml, 0.2 to 5 ng/ml, 0.2 to 3 ng/ml, 0.2 to 2 ng/ml, or 0.2 to 1 ng/ml.

[0928] In an embodiment a method disclosed herein comprises administering to a subject an mTOR inhibitor, e.g. an, allosteric inhibitor, e.g., RAD001, at a dosage that provides a target trough level of 0.3 to 10 ng/ml, 0.3 to 5 ng/ml, 0.3 to 3 ng/ml, 0.3 to 2 ng/ml, or 0.3 to 1 ng/ml.

[0929] In an embodiment a method disclosed herein comprises administering to a subject an mTOR inhibitor, e.g., an allosteric inhibitor, e.g., RAD001, at a dosage that provides a target trough level of 0.4 to 10 ng/ml, 0.4 to 5 ng/ml, 0.4 to 3 ng/ml, 0.4 to 2 ng/ml, or 0.4 to 1 ng/ml.

[0930] In an embodiment a method disclosed herein comprises administering to a subject an mTOR inhibitor, e.g., an allosteric inhibitor, e.g., RAD001, at a dosage that provides a target trough level of 0.5 to 10 ng/ml, 0.5 to 5 ng/ml, 0.5 to 3 ng/ml, 0.5 to 2 ng/ml, or 0.5 to 1 ng/ml.

[0931] In an embodiment a method disclosed herein comprises administering to a subject an mTOR inhibitor, e.g., an allosteric inhibitor, e.g., RAD001, at a dosage that provides a target trough level of 1 to 10 ng/ml, 1 to 5 ng/ml, 1 to 3 ng/ml, or 1 to 2 ng/ml.

[0932] As used herein, the term “trough level” refers to the concentration of a drug in plasma just before the next dose, or the minimum drug concentration between two doses.

[0933] In some embodiments, a target trough level of RAD001 is in a range of between about 0.1 and 4.9 ng/ml. In an embodiment, the target trough level is below 3 ng/ml, e.g., is between 0.3 or less and 3 ng/ml. In an embodiment, the target trough level is below 3 ng/ml, e.g., is between 0.3 or less and 1 ng/ml.

[0934] In a further aspect, the invention can utilize an mTOR inhibitor other than RAD001 in an amount that is associated with a target trough level that is bioequivalent to the specified target trough level for RAD001. In an embodiment, the target trough level for an mTOR inhibitor other than RAD001, is a level that gives the same level of mTOR inhibition (e.g., as measured by a method described herein, e.g., the inhibition of P70 S6) as does a trough level of RAD001 described herein.

[0935] Pharmaceutical Compositions: mTOR Inhibitors

[0936] In one aspect, the present invention relates to pharmaceutical compositions comprising an mTOR inhibitor, e.g., an mTOR inhibitor as described herein, formulated for use in combination with CAR cells described herein.

[0937] In some embodiments, the mTOR inhibitor is formulated for administration in combination with an additional, e.g., as described herein.

[0938] In general, compounds of the invention will be administered in therapeutically effective amounts as described above via any of the usual and acceptable modes known in the art, either singly or in combination with one or more therapeutic agents.

[0939] The pharmaceutical formulations may be prepared using conventional dissolution and mixing procedures. For example, the bulk drug substance (e.g., an mTOR inhibitor or stabilized form of the compound (e.g., complex with a cyclodextrin derivative or other known complexation agent) is dissolved in a suitable solvent in the presence of one or more of the excipients described herein. The mTOR inhibitor is typically formulated into pharmaceutical dosage forms to provide an easily controllable dosage of the drug and to give the patient an elegant and easily handleable product.

[0940] Compounds of the invention can be administered as pharmaceutical compositions by any conventional route, in particular enterally, e.g., orally, e.g., in the form of tablets or capsules, or parenterally, e.g., in the form of injectable solutions or suspensions, topically, e.g., in the form of lotions, gels, ointments or creams, or in a nasal or suppository form. Where an mTOR inhibitor is administered in combination with (either simultaneously with or separately from) another agent as described herein, in one aspect, both components can be administered by the same route (e.g., parenterally). Alternatively, another agent may be administered by a different route relative to the mTOR inhibitor. For example, an mTOR inhibitor may be administered orally and the other agent may be administered parenterally.

[0941] Sustained Release

[0942] mTOR inhibitors, e.g., allosteric mTOR inhibitors or catalytic mTOR inhibitors, disclosed herein can be provided as pharmaceutical formulations in form of oral solid dosage forms comprising an mTOR inhibitor disclosed herein, e.g., rapamycin or RAD001, which satisfy product stability requirements and/or have favorable pharmacokinetic properties over the immediate release (IR) tablets, such as reduced average plasma peak concentrations, reduced inter- and intra-patient variability in the extent of drug absorption and in the plasma peak concentration, reduced Cₘₐₓ/Cₘᵢₙ ratio and/or reduced food effects. Provided pharmaceutical formulations may allow for more precise dose adjustment and/or reduce frequency of adverse events thus providing safer treatments for patients with an mTOR inhibitor disclosed herein, e.g., rapamycin or RAD001.

[0943] In some embodiments, the present disclosure provides stable extended release formulations of an mTOR inhibitor disclosed herein, e.g., rapamycin or RAD001, which are multi-particulate systems and may have functional layers and coatings.

[0944] The term “extended release, multi-particulate formulation as used herein refers to a formulation which enables release of an mTOR inhibitor disclosed herein, e.g., rapamycin or RAD001, over an extended period of time e.g. over at least 1, 2, 3, 4, 5 or 6 hours. The extended release formulation may contain matrices and coatings made of special excipients, e.g., as described herein, which are formulated in a manner as to make the active ingredient available over an extended period of time following ingestion.

[0945] The term “extended release” can be interchangeably used with the terms “sustained release” (SR) or “prolonged release”. The term “extended release” relates to a pharmaceutical formulation that does not release active drug substance immediately after oral dosing but over an extended in accordance with the definition in the pharmacopoeias Ph. Eur. (7^{th} edition) mongraph for tablets and capsules and USP general chapter <1151> for pharmaceutical dosage forms. The term “Immediate Release” (IR) as used herein refers to a pharmaceutical formulation which releases 85% of the active drug substance within less than 60 minutes in accordance with the definition of “Guidance for Industry: “Dissolution Testing of Immediate Release Solid Oral Dosage Forms” (FDA CDER, 1997). In some embodiments, the term “immediate release” means release of everolismus from tablets within the time of 30 minutes, e.g., as measured in the dissolution assay described herein.

[0946] Stable extended release formulations of an mTOR inhibitor disclosed herein, e.g., rapamycin or RAD001, can be characterized by an in-vitro release profile using assays known in the art, such as a dissolution assay as described herein: a dissolution vessel filled with 900 mL phosphate buffer pH 6.8 containing sodium dodecyl sulfate 0.2% at 37° C. and the dissolution is performed using a paddle method at 75 rpm according to USP by according to USP testing monograph 711, and Ph.Eur. testing monograph 2.9.3. respectively.

[0947] In some embodiments, stable extended release formulations of an mTOR inhibitor disclosed herein, e.g., rapamycin or RAD001, release the mTOR inhibitor in the in-vitro release assay according to following release specifications:

[0948] 0.5 h: <45%, or <40, e.g., <30%

[0949] 1 h: 20-80%, e.g., 30-60%
[0950] 2 h: >50%, or >70%, e.g., >75%
[0951] 3 h: >60%, or >65%, e.g., >85%, e.g., >90%.

[0952] In some embodiments, stable extended release formulations of an mTOR inhibitor disclosed herein, e.g., rapamycin or RAD001, release 50% of the mTOR inhibitor not earlier than 45, 60, 75, 90, 105 min or 120 min in the in-vitro dissolution assay.

[0953] Biopolymer Delivery Methods

[0954] In some embodiments, one or more CAR-expressing cells as disclosed herein can be administered or delivered to the subject via a biopolymer scaffold, e.g., a biopolymer implant. Biopolymer scaffolds can support or enhance the delivery, expansion, and/or dispersion of the CAR-expressing cells described herein. A biopolymer scaffold comprises a biocompatible (e.g., does not substantially induce an inflammatory or immune response) and/or a biodegradable polymer that can be naturally occurring or synthetic.

[0955] Examples of suitable biopolymers include, but are not limited to, agar, agarose, alginate, alginate/calcium phosphate cement (CPC), beta-galactosidase (β-GAL), (1,2,3,4,6-pentaacetyl a-D-galactose), cellulose, chitin, chitosan, collagen, elastin, gelatin, hyaluronic acid collagen, hydroxyapatite, poly(3-hydroxybutyrate-co-3-hydroxy-hexanoate) (PHBHHx), poly(lactide), poly(caprolactone) (PCL), poly(lactide-co-glycolide) (PLG), polyethylene oxide (PEO), poly(lactic-co-glycolic acid) (PLGA), polypropylene oxide (PPO), polyvinyl alcohol) (PVA), silk, soy protein, and soy protein isolate, alone or in combination with any other polymer composition, in any concentration and in any ratio. The biopolymer can be augmented or modified with adhesion- or migration-promoting molecules, e.g., collagen-mimetic peptides that bind to the collagen receptor of lymphocytes, and/or stimulatory molecules to enhance the delivery, expansion, or function, e.g., anti-cancer activity, of the cells to be delivered. The biopolymer scaffold can be an injectable, e.g., a gel or a semi-solid, or a solid composition.

[0956] In some embodiments, CAR-expressing cells described herein are seeded onto the biopolymer scaffold prior to delivery to the subject. In embodiments, the biopolymer scaffold further comprises one or more additional therapeutic agents described herein (e.g., another CAR-expressing cell, an antibody, or a small molecule) or agents that enhance the activity of a CAR-expressing cell, e.g., incorporated or conjugated to the biopolymers of the scaffold. In embodiments, the biopolymer scaffold is injected, e.g., intratumorally, or surgically implanted at the tumor or within a proximity of the tumor sufficient to mediate an anti-tumor effect. Additional examples of biopolymer compositions and methods for their delivery are described in Stephan et al., Nature Biotechnology, 2015, 33:97-101; and WO2014/110591.

[0957] Pharmaceutical Compositions and Treatments

[0958] Pharmaceutical compositions of the present invention may comprise a CAR-expressing cell, e.g., a plurality of CAR-expressing cells, as described herein, in combination with one or more pharmaceutically or physiologically acceptable carriers, diluents or excipients. Such compositions may comprise buffers such as neutral buffered saline, phosphate buffered saline and the like; carbohydrates such as glucose, mannose, sucrose or dextrans, mannitol; proteins; polypeptides or amino acids such as glycine; antioxidants; chelating agents such as EDTA or glutathione; adjuvants (e.g., aluminum hydroxide); and preservatives. Compositions of the present invention are in one aspect formulated for intravenous administration.

[0959] Pharmaceutical compositions of the present invention may be administered in a manner appropriate to the disease to be treated (or prevented). The quantity and frequency of administration will be determined by such factors as the condition of the patient, and the type and severity of the patient's disease, although appropriate dosages may be determined by clinical trials.

[0960] In one embodiment, the pharmaceutical composition is substantially free of, e.g., there are no detectable levels of a contaminant, e.g., selected from the group consisting of endotoxin, mycoplasma, replication competent lentivirus (RCL), p24, VSV-G nucleic acid, HIV gag, residual anti-CD3/anti-CD28 coated beads, mouse antibodies, pooled human serum, bovine serum albumin, bovine serum, culture media components, vector packaging cell or plasmid components, a bacterium and a fungus. In one embodiment, the bacterium is at least one selected from the group consisting of Alcaligenes faecalis, Candida albicans, Escherichia coli, Haemophilus influenza, Neisseria meningitides, Pseudomonas aeruginosa, Staphylococcus aureus, Streptococcus pneumonia, and Streptococcus pyogenes group A.

[0961] When “an immunologically effective amount,” “an anti-tumor effective amount,” “a tumor-inhibiting effective amount,” or “therapeutic amount” is indicated, the precise amount of the compositions of the present invention to be administered can be determined by a physician with consideration of individual differences in age, weight, tumor size, extent of infection or metastasis, and condition of the patient (subject). It can generally be stated that a pharmaceutical composition comprising the immune effector cells (e.g., T cells, NK cells) described herein may be administered at a dosage of 10⁴ to 10⁹ cells/kg body weight, in some instances 10⁵ to 10⁶ cells/kg body weight, including all integer values within those ranges. T cell compositions may also be administered multiple times at these dosages. The cells can be administered by using infusion techniques that are commonly known in immunotherapy (see, e.g., Rosenberg et al., New Eng. J. of Med. 319:1676, 1988).

[0962] In certain aspects, it may be desired to administer activated immune effector cells (e.g., T cells, NK cells) to a subject and then subsequently redraw blood (or have an apheresis performed), activate immune effector cells (e.g., T cells, NK cells) therefrom according to the present invention, and reinfuse the patient with these activated and expanded immune effector cells (e.g., T cells, NK cells). This process can be carried out multiple times every few weeks. In certain aspects, immune effector cells (e.g., T cells, NK cells) can be activated from blood draws of from 10 cc to 400 cc. In certain aspects, immune effector cells (e.g., T cells, NK cells) are activated from blood draws of 20 cc, 30 cc, 40 cc, 50 cc, 60 cc, 70 cc, 80 cc, 90 cc, or 100 cc.

[0963] The administration of the subject compositions may be carried out in any convenient manner, including by aerosol inhalation, injection, ingestion, transfusion, implantation or transplantation. The compositions described herein may be administered to a patient trans arterially, subcutaneously, intradermally, intratumorally, intranodally, intramedullary, intramuscularly, by intravenous (i.v.) injection, or intraperitoneally. In one aspect, the T cell compositions of the present invention are administered to a patient by intradermal or subcutaneous injection. In one aspect, the T cell compositions of the present invention are administered by i.v. injection. The compositions of immune effector cells (e.g., T cells, NK cells) may be injected directly into a tumor, lymph node, or site of infection.

[0964] In a particular exemplary aspect, subjects may undergo leukapheresis, wherein leukocytes are collected, enriched, or depleted ex vivo to select and/or isolate the cells of interest, e.g., T cells. These T cell isolates may be expanded by methods known in the art and treated such that one or more CAR constructs of the invention may be introduced, thereby creating a CAR T cell of the invention. Subjects in need thereof may subsequently undergo standard treatment with high dose chemotherapy followed by peripheral blood stem cell transplantation. In certain aspects, following or concurrent with the transplant, subjects receive an infusion of the expanded CAR T cells of the present invention. In an additional aspect, expanded cells are administered before or following surgery.

[0965] The dosage of the above treatments to be administered to a patient will vary with the precise nature of the condition being treated and the recipient of the treatment. The scaling of dosages for human administration can be performed according to art-accepted practices. The dose for CAMPATH, for example, will generally be in the range 1 to about 100 mg for an adult patient, usually administered daily for a period between 1 and 30 days. The preferred daily dose is 1 to 10 mg per day although in some instances larger doses of up to 40 mg per day may be used (described in U.S. Pat. No. 6,120,766).

[0966] In one embodiment, the CAR is introduced into immune effector cells (e.g., T cells, NK cells), e.g., using in vitro transcription, and the subject (e.g., human) receives an initial administration of CAR immune effector cells (e.g., T cells, NK cells) of the invention, and one or more subsequent administrations of the CAR immune effector cells (e.g., T cells, NK cells) of the invention, wherein the one or more subsequent administrations are administered less than 15 days, e.g., 14, 13, 12, 11, 10, 9, 8, 7, 6, 5, 4, 3, or 2 days after the previous administration. In one embodiment, more than one administration of the CAR immune effector cells (e.g., T cells, NK cells) of the invention are administered to the subject (e.g., human) per week, e.g., 2, 3, or 4 administrations of the CAR immune effector cells (e.g., T cells, NK cells) of the invention are administered per week. In one embodiment, the subject (e.g., human subject) receives more than one administration of the CAR immune effector cells (e.g., T cells, NK cells) per week (e.g., 2, 3 or 4 administrations per week) (also referred to herein as a cycle), followed by a week of no CAR immune effector cells (e.g., T cells, NK cells) administrations, and then one or more additional administration of the CAR immune effector cells (e.g., T cells, NK cells) (e.g., more than one administration of the CAR immune effector cells (e.g., T cells, NK cells) per week) is administered to the subject. In another embodiment, the subject (e.g., human subject) receives more than one cycle of CAR immune effector cells (e.g., T cells, NK cells), and the time between each cycle is less than 10, 9, 8, 7, 6, 5, 4, or 3 days. In one embodiment, the CAR immune effector cells (e.g., T cells, NK cells) are administered every other day for 3 administrations per week. In one embodiment, the CAR immune effector cells (e.g., T cells, NK cells) of the invention are administered for at least two, three, four, five, six, seven, eight or more weeks.

[0967] In one aspect, CAR-expressing cells of the present inventions are generated using lentiviral viral vectors, such as lentivirus. Cells, e.g., CARTs, generated that way will have stable CAR expression.

[0968] In one aspect, CAR-expressing cells, e.g., CARTs, are generated using a viral vector such as a gammaretroviral vector, e.g., a gammaretroviral vector described herein. CARTs generated using these vectors can have stable CAR expression.

[0969] In one aspect, CARTs transiently express CAR vectors for 4, 5, 6, 7, 8, 9, 10, 11, 12, 13, 14, 15 days after transduction. Transient expression of CARs can be effected by RNA CAR vector delivery. In one aspect, the CAR RNA is transduced into the T cell by electroporation.

[0970] A potential issue that can arise in patients being treated using transiently expressing CAR immune effector cells (e.g., T cells, NK cells) (particularly with murine scFv bearing CARTs) is anaphylaxis after multiple treatments.

[0971] Without being bound by this theory, it is believed that such an anaphylactic response might be caused by a patient developing humoral anti-CAR response, i.e., anti-CAR antibodies having an anti-IgE isotype. It is thought that a patient's antibody producing cells undergo a class switch from IgG isotype (that does not cause anaphylaxis) to IgE isotype when there is a ten to fourteen day break in exposure to antigen.

[0972] If a patient is at high risk of generating an anti-CAR antibody response during the course of transient CAR therapy (such as those generated by RNA transductions), CART infusion breaks should not last more than ten to fourteen days.

### Examples

[0973] The invention is further described in detail by reference to the following experimental examples. These examples are provided for purposes of illustration only, and are not intended to be limiting unless otherwise specified. Thus, the invention should in no way be construed as being limited to the following examples, but rather, should be construed to encompass any and all variations which become evident as a result of the teaching provided herein.

Treatment of Patient with CLL with CART19

[0974] Patient UPCC04409-10 was treated with autologous CART19 T cells for CLL. The treatment led to complete remission of the CLL.

[0975] Analysis of CART Cell Population

[0976] As shown in FIG. 1, CART cells in patient UPCC04409-10 were monitored over time by sampling blood. The amount of BBZ expression in cells was determined (red). The number of copies of sequence from the Vbeta5.1 TCR family was determined (blue). Both measurements were made from samples collected on the indicated days after the second infusion of CART cells. As shown in FIG. 2, the T-cell receptor repertoire from patient UPCC04409-10 was determined from a sample collected on day 28 (FIG. 2A) or day 51 (FIG. 2B) after CART infusion. This demonstrates the abundance of the TCRBV05-01 family of T-cell receptors at day 51 indicating clonal expansion over time. As shown in FIG. 3, The T-cells isolated from patient UPCC04409-10 were analyzed for the simultaneous expression of CAR19 and 2 different TCR family genes over time (day 50 and day 51) and compared to the input dosed material (product): upper panel is TCR family Vb13.1; the lower panel shows TCR family Vb5.1. The data demonstrate that the CAR19 positive cells contain a single TCR family gene (Vb5.1) that becomes rapidly enriched between days 50 and 51. As shown in FIG. 4, the T-cell receptor repertoire of CD8 positive cells from patient UPCC04409-10 was determined from a sample collected on day 51 after CART infusion. This demonstrates the abundance of the TCRBV05-01 family of T-cell receptors at day 51 indicating clonal expansion of CD8 positive cells over time.

### Analysis of Persisting CART Clone

[0977] As shown in FIG. 6, sonically fragmented DNA was generated from T-cells from Patient #. This material was used to amplify genomic sequences adjacent to the CAR19 insertion. The genes indicated were identified as being enriched relative to the infused product (DO) adjacent to CAR19 in the genome. At the different time points after CART infusion indicated (d=day; m=month), a different relative abundance of adjacent genes was seen, with Tet2 abundance peaking in both peripheral blood (PBMC) and CAR+CD8+ T-cells samples at day 51.

[0978] As shown in FIG. 7, the site of insertion of the CAR19 gene was mapped to the Tet2 gene. More specifically, the insertion occurred between exons 9 and 10 of the Tet2 gene. The catalytic domain for Tet2 resides in exon 11. The insertion at this location may lead to expression of aberrant mRNA transcripts or decrease the expression of functional (wild-type) Tet2.

[0979] As shown in FIG. 8, transcripts of the Tet2 gene from mRNA isolated from patient UPCC04409-10 were evaluated by RTPCR using primers spanning the indicated regions of Tet2 or CAR19 or both as indicated in the right hand side of the figure. Rxn 3 contains primers designed to amplify the region of the Tet2 transcript spanning exons 9 and 10. Rxn, 6, 7, 8, 9, and 10 are primers designed to amplify the indicated portions of the CAR19 lentivirus. Rxn 12-16 are pairs of primers that contain exon 9 sequence of the Tet2 transcript as well as sequence from the CAR19 lentiviral construct. These data show that transcripts are made from the Tet2 locus that contains both Tet2 sequence as well as CAR19 sequence.

### Analysis of Tet2 Function

[0980] As shown in FIG. 10, the enzymatic activity of Tet2 is schematized (FIG. 10A). Tet family protein convert 5-methylcytosine (5-mc) to 5-hydroxymethylcytosine (5-hmc) and then into 5-formylcytosine (5-fmc) resulting in demethylated cytosine. Methylated DNA is an epigenetic state that is known to affect transcriptional profiles. The methylation state of the T-cells from patient UPCC04409-10 was evaluated (FIG. 10B). The patient's T-cells were stained for TCRVb5.1 (which contain the CAR19 insertion at Tet2) and the 5-hmc and 5-fmc were evaluated in TCRVb5.1 positive (red) and TCRVb5.1 negative (blue) populations by flow cytometry. This data indicates that the cells containing the insertion of CAR19 in the Tet2 gene are defective in demethylation.

Treatment of T Cells with shRNA Tet2 Inhibitors

### Materials and Methods

[0981] Lenti-Viral Preparation and Infection to the Jurkat Cells

[0982] Lenti-viruses were prepared from 15 cm 293T cells. Briefly, 10 million 293T cells were seeded onto collagen coated 15 cm dishes at day −1. At day 0, 15ug shRNA vector (i.e., vector comprising sequence encoding the TET2-targeting or control shRNA), 15ug Gag/pol vector, and 5ug VSV-G vector were transfected using Lipofectamin 2000 (Invitrogen). 24 hours later (day 1), media was changed. After changing media, viral supernants were harvested at day 2 and day 3. Viruses were concentrated with Lenti-X concentrator (3:1 volume ratio, Clonetech, Cat #: 631231). 100ul of viruses were added into either 0.5 million jurkat cells in the presence of 6 ug/ml of polybrene. The cells were spin-infected at 2000 rpm, 90 min at 32° C. After 1 hour incubation at 37 degree incubator, fresh RPMI 1640 media were added and transferred into 24-well plate. At day 6, cells were transferred into 6-well plate in the presence of final concentration 2 ug/ml of puromycin for 6 days.

[0983] Antibodies

[0984] Antibodies used for western blotting were as follows: j-actin (clone #: 8H10D10, Cell Signaling); TET2 (clone #: hT2H21F11, Millipore); mouse IgG(H+L) (HRP conjugated, Cat #: 115-035-166, Jackson ImmunoResearch); rabbit IgG(H+L) (HRP conjugated, Cat #: 111-035-114, Jackson ImmunoResearch).

[0985] Western Blotting

[0986] To examine TET2 shRNA knockdown efficiency at protein level in jurkat cells, cell lysates were prepared in protease inhibitor cocktails (Sigma) containing RIPA buffer. Protein concentration was measured by BCA protein assay kits (Pierce, Item #: 3603904). 20ug of protein was subjected to SDS-PAGE followed by transferring protein onto nitrocellulose membrane using iBot transfer system (Invitrogen, 20V, 11 min 30 sec). The membrane was blocked in 5% BSA containing TBST for 30 min at room temperature. Antibodies were overnight incubated with membranes at 1:000 dilution at 4° C. After incubation with HRP conjugated secondary antibodies, signal was detected using chemiluminescence detection machine (Chemidoc; Bio-Rad).

[0987] Quantitative RT-PCR

[0988] To examine TET2 shRNA knock-down efficiency at DNA level in jurkat cells, quantitative reverse transcription polymerase chain reaction (qRT-PCR) was performed. A RNeasy Micro Kit (Qiagen) was used to extract RNA. mRNA was reverse transcribed to single-strand complementary DNA (cDNA) with SuperScript III First-Strand Synthesis System for RT-PCR (Invitrogen). Real-time PCR was performed with C1000 Touch Thermal Cycler (Biorad). A SYBR-based protocol was used to detect gene expression (SsoAdvanced Universal SYBR Green Supermix, Biorad). The PCR reactions were done in 96-well plates and run using the manufacture's recommended cycling parameters with triplicate (95° C. for 3 minutes, followed by 40 cycles of 95° C. for 15 seconds and 60° C. for 30 seconds). Cycle threshold (Ct) values for the genes of interest were normalized to the Ct for p-actin. Primers used for qRT-PCR were as

follows: β-actin #1
(fowrard primer:
(SEQ ID NO: 1263)
CAT GTA CGT TGC TAT CCA GGC,
reverse primer:
(SEQ ID NO: 1264)
CTC CTT AAT GTC ACG CAC GAT;
product size 250 bp);
p-actin #2 (fowrard primer:
(SEQ ID NO: 1265)
CTC ACC ATG GAT GAT GAT ATC GC,
reverse primer:
(SEQ ID NO: 1266)
CCA CAT AGG AAT CCT TCT GAC CC;
product size 169 bp);
TET1
(forward primer:
(SEQ ID NO: 1267)
CAG AAC CTA AAC CAC CCG TG,
reverse primer:
(SEQ ID NO: 1268)
TGC TTC GTA GCG CCA TTG TAA;
product size 141 bp);
TET2
(forward primer:
(SEQ ID NO: 1269)
ATA CCC TGT ATG AAG GGA AGC C,
reverse primer:
(SEQ ID NO: 1270)
CTT ACC CCG AAG TTA CGT CTT TC;
product size 197 bp);
TET3
(forward primer:
(SEQ ID NO: 1271)
CAC CCG GCT CTA TGA AAC CTT,
reverse primer:
(SEQ ID NO: 1272)
CCA GCC ACT CGA GGT AGT CA;
product size 209 bp);
RPLP1 (Cat#: PPH17813G-200, Qiagen).

[0989] Flow Cytometry

[0990] The cells were acquired on a FACS Fortessa (BD). Data processing for presentation was done using FlowJo (Treestar Inc.) program.

### Results

[0991] Validation of Knockdown Efficiency of Tet2 shRNAs

[0992] As shown in FIG. 27, the validation of knockdown efficiency of TET2 shRNAs is schematized. TET2 and scramble control shRNA constructs expressing Red Fluorescence Protein (RPF) and puromycin resistant gene were introduced into jurkat cells to validate knockdown efficiency of TET2 shRNAs by qRT-PCR and western blot experiments.

[0993] As shown in FIG. 28, shRNA infected jurkat cells express RFP. RFP expression was determined by FACS on day 6 after puromycin treatment. Based on RFP expression, greater than 99% shRNA introduced jurkat cells were selected by puromycin treatment. Of note, TET2 shRNA #3 and #4 infected jurkat cells did not grow in the presence of puromycin. Therefore, TET2 shRNA #3 and #4 infected jurkat cells were not processed further. This data indicates that puromycin is effective to select shRNA infected jurkat cells.

[0994] As shown in FIG. 29, knockdown efficiency of tet2 depends on shRNAs. To determine mRNA expression level of tet1 and tet2 and tet3 in TET2 shRNAs infected jurkat cells, qRT-PCR experiment was performed. Compared to scramble shRNA, TET2 shRNA #1, #2, #8, and #9 knockdown tet2 gene at 35.6%, 22.7%, 21.6%, and 76.7% respectively. Surprisingly, while TET2 shRNA #9 knocks down tet2 efficiently, it also down-regulates tet1 and tet3 expression at 43.4% and 67.3% respectively. 3-actin serves as an internal control to quantify relative gene expression among samples tested. To increase reliability of qRT-PCR, two j-actin primers and one RPLP1 primer were used in this experiment. This data indicates that several TET2-targeting shRNA are capable of reducing mRNA levels of TET2, with shRNA #9 showing the most robust knockdown effect of tet2, while also affecting levels of TET1 and TET2.

[0995] As shown in FIG. 30, knockdown of TET2 protein in response to shRNAs correlates with knockdown of TET2 mRNA levels. To determine protein expression level of TET2 in TET2 shRNAs infected jurkat cells, a western blot experiment was performed. Similar to qRT-PCR data as shown in FIG. 29, TET2 shRNA #1, #2, #8, and #9 reduce TET2 protein level compared to scramble shRNA, while 3-actin is constitutively expressed in all samples tested. This data indicates that several TET2-targeting shRNA are capable of reducing TET2 protein levels in Jurkat cells, with shRNA #9 showing the most robust knockdown effect of Tet2.

[0996] Treatment of Primary T Cells with shRNA Tet2 Inhibitors

[0997] As shown in FIG. 11, TET2 shRNAs reduce 5-hmc levels in normal human T cells. TET2 and scramble control shRNA constructs expressing mCherry were introduced into normal human T cells. 5-hmc levels were determined by intracellular staining by FACS on day 6 following expansion with anti-CD3/CD28 beads. Knockdown of TET2 reduced overall 5-hmc levels.

[0998] As shown in FIG. 12, TET2 shRNAs expand Tscm T cells. TET2 and scramble control shRNA constructs expressing mCherry were introduced into normal human T cells. CD45RA+CD62L+CCR7+CD27+CD95+ Tscm T cells were determined by FACS staining on day 11 following expansion with anti-CD3/CD28 beads. Knockdown of TET2 promoted the expansion of T cells with a Tscm phenotype.

### Tet2 Inhibition in CAR T Cells Using CRISPR/Cas Gene Editing Systems

[0999] In this example, inhibition of TET2 was explored in chimeric antigen receptor (CAR)-expressing T cells.

### Methods

[1000] Guide RNA Molecules

[1001] gRNA molecules comprising the targeting sequences listed in Table 5 were used for the experiments described in this subexample. Unless otherwise indicated, all gRNA molecules were tested as dual gRNA molecules comprising the tracr and crRNA sequences described in this subexample.

TABLE 5

| Target | | |
|---|---|---|
| Region | TET2 gRNA targeting sequence | guide reference |
| Exon 9 | CAGAGCACCAGAGUGCCGUC | 9_1 (also referred to as |
| | (SEQ ID NO: 1273) | Tet2 E9_1_Tet2) |
| Exon 9 | AGAGCACCAGAGUGCCGUCU | 9_2 (also referred to as |
| | (SEQ ID NO: 1274) | Tet2 E9_2_Tet2) |
| Exon 9 | UUCAGACCCAGACGGCACUC | 9_3 (also referred to as |
| | (SEQ ID NO: 1275) | Tet2 E9_3_Tet2) |
| Exon 9 | AUGGCAGCACAUUGGUAAGU | 9_4 (also referred to as |
| | (SEQ ID NO: 1276) | Tet2 E9_4_Tet2) |
| Exon 9 | CACAUUGGUAAGUUGGGCUG | 9_5 (also referred to as |
| | (SEQ ID NO: 1277) | Tet2 E9_5_Tet2) |
| Exon 9 | GACUUGCACAACAUGCAGAA | 9_6 (also referred to as |
| | (SEQ ID NO: 1278) | Tet2_E9_5_Tet2, Ex9-3 |
| | | or crEx9-3) |
| exon 7 | UCAUGGAGCAUGUACUACAA | 7_1 |
| | (SEQ ID NO: 1279) | |
| exon 7 | AACUUGCGCCUGUCAGGGGC | 7_2 |
| | (SEQ ID NO: 1280) | |
| exon 7 | CCAAGGAAGUUUAAGCUGCU | 7_3 |
| | (SEQ ID NO: 1281) | |
| exon 7 | CCAAGCAGCUUAAACUUCCU | 7_4 |
| | (SEQ ID NO: 1282) | |
| exon 8 | UUGGUGCCAUAAGAGUGGAC | 8_1 |
| | (SEQ ID NO: 1283) | |
| exon 8 | GCAAAACCUGUCCACUCUUA | 8_2 |
| | (SEQ ID NO: 1284) | |
| exon 8 | ALAUGUUGGUGCCALAAGAG | 8_3 |
| | (SEQ ID NO: 1285) | |
| exon 10 | AAAACGGAGUGGUGCCAUUC | 10_1 |
| | (SEQ ID NO: 1286) | |
| exon 10 | GUCUCUGACGUGGAUGAGUU | 10_2 |
| | (SEQ ID NO: 1287) | |
| exon 10 | UUUAUACAAAGUCUCUGACG | 10_3 |
| | (SEQ ID NO: 1288) | |
| exon 10 | AGAGAAGACAAUCGAGAAUU | 10_4 |
| | (SEQ ID NO: 1289) | |
| exon 10 | ACGUCAGAGACUUUGUAUAA | 10_5 |
| | (SEQ ID NO: 1290) | |
| exon 3 | GGAUAGAACCAACCAUGUUG | 3_1 (also referred to as |
| | (SEQ ID NO: 1291) | Tet2 E3_1_Tet2) |
| exon 3 | UUGUAGCCAGAGGUUCUGUC | 3_2 (also referred to as |
| | (SEQ ID NO: 1292) | Tet2 E3_2_Tet2) |
| exon 3 | UCUGUUGCCCUCAACAUGGU | 3_3_(also referred to as |
| | (SEQ ID NO: 1293) | Tet2_E3_3_Tet2, Ex3-3 |
| | | or crEx3-3) |
| exon 3 | GAUAGAACCAACCAUGUUGA | 3_4 (also referred to as |
| | (SEQ ID NO: 1294) | Tet2 E3_4_Tet2) |
| exon 3 | UUCUGGAGCUUUGUAGCCAG | 3_5 (also referred to as |
| | (SEQ ID NO: 1295) | Tet2 E3_5_Tet2) |

[1002] Generation of CRISPR CAR T Cells

Isolated and frozen Pan T cells were thawed and activated with CD3/CD28 beads (CD3/CD28 CTS Dynabeads® 43205D) on day 0. Activated T cells were transduced with lentivirus encoding either a BCMA CAR (BCMA-10 (139109) as described in WO2016/0046724; referred to herein as BCMA-10 CAR) or CD19 CAR (the CD19 CAR having the amino acid sequence of SEQ ID NO: 12 of WO2012/079000; referred to herein as CD19 CAR) on day 1. On day 3, transduced CAR T cells were electroporated to introduce CRISPR/Cas systems in the form of pre-complexed gRNA/Cas9 ribonuclear protein (“RNP”). To form RNP, all RNA samples were heated at 95C. S. pyogenes CAS9 Protein (NLS CAS9 iPROT106154, 37 μM) was diluted in buffer before tracrRNA (having the sequence: AACAGCAUAGCAAGUUAAAAUAAGGCUAGUCCGUUAUCAACUUGAAAAAGUGGC ACCGAGUCGGUGUUUUUUU (SEQ ID NO: 1296); AXO Labs) was added to it. After mixing CAS9 Protein with tracrRNA, the CRISPR RNA was added (in each case, each crRNA comprised the sequence nnnnnnnnnnnnnnnnnnnnGUUUUAGAGCUAUGCUGUUUUG (SEQ ID NO: 40), where the n residues represent the 20 ribonucleic acid residues of the indicated targeting sequence). The precomplexed RNPs were then added to a total of 1 million cells, RNP concentration was 3.2 μM. Electroporation was done by neon electroporator using Neon® Transfection System 100 μL Kit (MPKI0096) at 1600V, 10 ms, 3 pulses. The cells were kept in culture for 7 more days. Cells were then divided, with some used to perform flow cytometry: Staining for CAR (PE), CD3 (PerCP-Cy5.5), CD4 (V450) and CD8 (APC). Remaining T cells were frozen and used for functional assays and next generation sequencing (NGS) sample generation.

[1003] Next Generation Sequencing (NGS) Sample Generation

[1004] Frozen edited cell pellets (described above) were thawed and processed using DNeasy Blood & Tissue Kit (Qiagen, 69506) to isolate genomic DNA. Eluted DNA was used to run PCR using Titanium Taq PCR kit (Clontech Laboratories, 639211) and TET2 primers (primers designed to flank the expected target site of the gRNA). PCR product was purified using QIAquickPCR Purification Kit (Qiagen, 28104). Purified PCR product was then used for T7E1 assay to detect base pair mismatches and confirm gene editing. PCR amplicons were subjected to standard Nextera NGS library prep (Illumina) and sequenced with paired-end reads on an Illumina MiSeq sequencer. Sequencing reads were aligned to the reference genome and variants were called.

[1005] Cytokine Production Assay

[1006] Effector cells (CAR T cells) are thawed on the day of the assay and counted on Cellometer (Nexelcom). These cells are then co cultured with different target cells at Effector:Target cell ratio of 2:1. 100ul of co-culture supernatant is harvested after 20h. These supernatants are then used measure the cytokines IL-2 and IFN-g released using Meso Scale Discovery, Proinflammatory Panel 1 catalog #N05049A-1 system according to the manufacturer's protocol.

[1007] T cell Proliferation Assay

[1008] CAR T cell proliferation in response to BCMA- or CD19-expressing target cells was evaluated. Target cell lines were: BCMA positive multiple myeloma cell lines, NCI-H929-luc, KMS-11-luc, and BCMA-negative Nalm6luc (CD19-positive cell line). CAR T cells were thawed incubated for 2 hours in T cell medium to recover. Cells were counted on a Cellometer. Target cells were irradiated at 10,000 rad. After irradiation, target cells were washed twice in complete T cell medium and counted. 30,000 Irradiated target cells were then co cultured with CART cells at 1:1 ratio. As a negative control, medium alone was added to CAR T cells.

[1009] The co-culture was incubated for 4 days at 37° C. On Day 4, coculture cells were stained for 20 mins on ice with CD3-percp cy5.5 (Ebioscience:45-0037), CD4-eflor450 (Ebioscience:48-0047), and CD8-APC(Ebioscience 17-0087 and measured by flow cytometry relative to CountBright Absolute Counting Beads (Life Technologies) to determine relative cell counts.). CAR expression was measured by two step incubation of 20 mins each on ice: Biotinylated-Protein L+Streptavidin-PE(Jackson immuno research). Flow cytometry data was acquired using BD 5 laser Fortessa and analyzed by FlowJo software.

### Results

[1010] FIGS. 13A and 13B show CAR expression in cells electroporated with and without Tet2 CRISPR. FIG. 13A shows the gating strategy for determining CAR+ T cells. Lymphocytes were selected using forward scatter (FSC-A) and side scatter (SSC-A) as encircled. CD3-expressing cells were then selected (middle panel). CAR positive (PE positive cells using CAR detection by biotinylated protein and streptavitin-PE) cells indicated by the bar were then determined by gating relative to the negative control peak. FIG. 13B shows the quantitation of the percentage of CAR positive cells. Cells were transduced with either the BCMA-10 CAR of the CD19 CAR as indicated. Cells were electroporated with RNP containing Cas9 protein, tracer RNA, and the indicated guide RNA targeting Tet2 (Ex3-3 targeting exon 3 or Ex9-6 targeting exon 9), or with no electroporation. CAR expression was determined 10 days after cell activation with beads. These data indicate that editing of Tet2 does not impact CAR expression in T cells.

[1011] FIG. 14 shows quantitation of CD4 and CD8 positive cells after CAR transduction and Tet2 editing. Cells were stained for CD3, CD4, CD8, and CAR expression at the end of the 10 day bead expansion. The left panel indicates the percentage of CD4 and CD8 positive cells in the total population of CD3+ cells. The right panel indicates the percentage of CD4 and CD8 positive cells in the population of CD3+ cells that are also CAR+. Cells were transduced with either the BCMA-10 CAR of the CD19 CAR or left untransduced (UTD) as indicated. Cells were electroporated with RNP containing Cas9 protein, tracer RNA, and the indicated guide RNA targeting Tet2 (Ex3-3 targeting exon 3 and Ex9-6 targeting exon 9), or with no electroporation. These data indicated that editing of Tet2 causes a small but consistent decrease in the percentage of CD8 cells and increase in the percentage of CD4 during the window of time of the bead-based expansion process.

[1012] FIG. 15 shows cell yield and viability after bead expansion for 10 days. The number of cells per mL (left panel) and the viability of cells (right panel) were measured by Cellometer after the 10 day bead expansion process. Cells were transduced with either the BCMA-10 CAR of the CD19 CAR or left untransduced (UTD) as indicated. Cells were electroporated with RNP containing Cas9 protein, tracer RNA, and the indicated guide RNA targeting Tet2 (Ex3-3 targeting exon 3 and Ex9-6 targeting exon 9), or with no electroporation. These data indicate that Tet2 editing causes an increase in cell number and viability relative to cells with no CRISPR/Cas9, with the Exon 9 targeting guide (ex9-6) showing the greatest impact in untransduced as well as CAR transduced cells.

[1013] FIG. 16 shows IL-2 production in response to cells either positive or negative for the antigen recognized by the CAR. CART cells or untransduced cells (UTD) were co-cultured with BCMA-positive/CD19-negative cells (KMS11 and NCIH929) or BCMA-negative/CD19-positive cells (NALM6) and cytokine secretion into the media was measured. IL-2 (pg/ml) levels are shown. Cells were prepared as described above. These data indicated that Tet2 editing causes an increase in IL-2 production by T cells in response to antigen with the Exon 9 targeting guide (Ex9-6) showing the greatest effect.

[1014] FIG. 17 shows interferon gamma production. CART cells or untransduced cells (UTD) were co-cultured with BCMA-positive/CD19-negative cells (KMS11 and NCIH929) or BCMA-negative/CD19-positive cells (NALM6) and cytokine secretion into the media was measured. Interferon gamma (IFN-g) (pg/ml) levels are shown. Cells were prepared as described above. These data indicated that Tet2 editing causes an increase in Interferon gamma production by T cells in response to antigen, with the Exon 9 targeting guide (Ex9-6) showing the greatest effect.

[1015] FIG. 18 shows antigen-driven CAR-T cell proliferation. CART cells or untransduced cells (UTD) were co-cultured with BCMA-positive/CD19-negative cells (KMS11 and NCIH929) or BCMA-negative/CD19-positive cells (NALM6) or no target cells (media) and proliferation of CAR positive T cells was measured. Cells were prepared as described above. These data indicated that Tet2 editing causes an increase in CAR+ T cell proliferation in response to antigen, with the Exon 9 targeting guide (CrEx9-6) showing the greatest effect.

[1016] FIG. 19 shows antigen-driven total T cell proliferation. CART cells or untransduced cells (UTD) were co-cultured with BCMA-positive/CD19-negative cells (KMS11 and NCIH929) or BCMA-negative/CD19-positive cells (NALM6) or no target cells (media) and proliferation of all CD3+ T cells was measured. Cells were prepared as described above. These data indicated that Tet2 editing causes an increase in CD3+ T cell proliferation in response to antigen, with the Exon 9 targeting guide (CrEx9-6) showing the greatest effect.

[1017] FIG. 20 shows antigen-driven CAR+ T cell proliferation. CART cells or untransduced cells (UTD) were co-cultured with BCMA-positive/CD19-negative cells (KMS11 and NCIH929) or BCMA-negative/CD19-positive cells (NALM6) or no target cells (media) and proliferation of all CD4+CD3+ T cells was measured. Cells were prepared as described above. These data indicated that Tet2 editing causes an increase in CD4+ T cell proliferation in response to antigen, with the Exon 9 targeting guide (CrEx9-6) showing the greatest effect.

[1018] FIG. 21 shows antigen-driven CAR+CD4+ T cell proliferation. CART cells or untransduced cells (UTD) were co-cultured with BCMA-positive/CD19-negative cells (KMS11 and NCIH929) or BCMA-negative/CD19-positive cells (NALM6) or no target cells (media) and proliferation of all CAR+CD4+CD3+ T cells was measured. Cells were prepared as described above. These data indicated that Tet2 editing causes an increase in CAR+CD4+ T cell proliferation in response to antigen, with the Exon 9 targeting guide (CrEx9-6) showing the greatest effect.

[1019] FIG. 22 shows antigen-driven CD8+ T cell proliferation. CART cells or untransduced cells (UTD) were co-cultured with BCMA-positive/CD19-negative cells (KMS11 and NCIH929) or BCMA-negative/CD19-positive cells (NALM6) or no target cells (media) and proliferation of all CD8+CD3+ T cells was measured. Cells were prepared as described above. These data indicated that Tet2 editing causes an increase in CD8+ T cell proliferation in response to antigen, with the Exon 9 targeting guide (CrEx9-6) showing the greatest effect.

[1020] FIG. 23 shows antigen-driven CAR+CD8+ T cell proliferation. CART cells or untransduced cells (UTD) were co-cultured with BCMA-positive/CD19-negative cells (KMS11 and NCIH929) or BCMA-negative/CD19-positive cells (NALM6) or no target cells (media) and proliferation of all CAR+CD8+CD3+ T cells was measured. Cells were prepared as described above. These data indicated that Tet2 editing causes an increase in CAR+CD8+ T cell proliferation in response to antigen, with the Exon 9 targeting guide (CrEx9-6) showing the greatest effect.

[1021] FIG. 24 shows % editing, and % frameshift edit by introduction of Tet2 targeting CRISPR/Cas systems. The level of editing in primary T cells after electroporation of RNP containing Cas9 protein, tracer RNA, and the indicated guide RNAs targeting either exon 3 or exon 9 of Tet2 is shown. The percentage of observed insertions or deletions of nucleotides relative to a reference genome is shown in the middle column (average % insertion/deletion). Editing that results in a shift in the open reading frame is shown in the far right column (average % frameshift). These data are the average of triplicates. These data indicate highly efficient genome editing in primary T cells with these guide RNA sequences.

[1022] The insertion and deletion pattern present at or near the target site for each gRNA was assessed by next generation sequencing. Briefly, T cells were electroporated with an RNP containing the indicated guide RNAs. After 48 hours, DNA was isolated and processed for sequencing. FIG. 25 shows the 5 most common indels (insertions and/or deletions) observed in primary T cells for the guides RNAs targeting exon 3 of Tet2. FIG. 26 shows the 5 most common indels (insertions and/or deletions) observed in primary T cells for the guides RNAs targeting exon 9 of Tet2. The percentages indicate the frequency with which a given editing pattern was observed. Insertions are shown by lowercase nucleotide letters (“a,” “g,” “c” or “t”), while deletions are shown by a dash (“—”).

### ATAC-Seq Experiments

[1023] CD8+ T cells with and without the Tet2 insertion were expanded from a patient's post-infusion sample. Chromatin accessibility was assessed using Assay for Transposase-Accessible Chromatin with high throughput sequencing (ATAC-seq). This is essentially a technique for global chromatin mapping based on the transposition of “barcoded” DNA fragments. These DNA fragments get incorporated into regions of open chromatin, which allow for determination of which chromatin regions are opened versus closed. Based on the location of open or closed regions, pathway analyses can be done under the assumption that “open” equals to “expressed” and “closed” equals to “repressed.” FIG. 30A shows Venn diagrams of ATAC peaks in the CAR+CD8+ T cells from a patient with a Tet2 disruption compared to CAR-CD8+ T cells from the same patient at the matched time point without the Tet2 disruption. FIG. 28B show GO terms associated with ATAC peaks more closed in the cell population with the Tet2 disruption, compared to its counterpart. The significance of FIG. 30B is, at least in part, that the chromatin landscape of the CD8+ T cells with the Tet2 disruption is possibly in line with a less differentiated cell that may be more “early memory-like” and less “effector-like.” These are the sort of cells that are thought to persist to provide robust and long-term anti-tumor activity.

### ShRNA Studies

[1024] T cells from healthy donors were activated for 24 hours via CD3/CD28-coated beads, followed by lentiviral transduction with either the non-targeting (control) shRNA or the Tet2 shRNA. As shown in FIG. 32A, knock-down efficiency was assessed by qPCR and shown to be 50% (may mirror what happened in the patient in which Tet2 was disrupted via lentiviral integration). The differentiation phenotype was examined at day 14 by examining CCR7, CD45RO. Central memory cells are defined as CCR7+CD45RO+, whereas effector cells are CCR7-CD45RO−. To examine the differentiation phenotype specifically in cells with the 50% Tet2 knockdown, a GFP indicator was used in the shRNA constructs. The results are shown in FIGS. 32B and 32C.

[1025] Without further description, it is believed that one of ordinary skill in the art can, using the preceding description and the following illustrative examples, make and utilize the compounds of the present invention and practice the claimed methods. The following working examples specifically point out various aspects of the present invention, and are not to be construed as limiting in any way the remainder of the disclosure.

### EQUIVALENTS

[1026] The disclosures of each and every patent, patent application, and publication cited herein are hereby incorporated herein by reference in their entirety. While this invention has been disclosed with reference to specific aspects, it is apparent that other aspects and variations of this invention may be devised by others skilled in the art without departing from the true spirit and scope of the invention. The appended claims are intended to be construed to include all such aspects and equivalent variations.

The application's sequence listing, which the Patent Office published only in electronic form, follows.

SEQUENCE LISTING (1363 sequences)

SEQ ID NO: 1 - DNA, 1184 bp, synthetic construct
  misc_feature 1..1184: note = Description of Artificial Sequence: Synthetic polynucleotide
  source 1..1184: mol_type = other DNA
cgtgaggctccggtgcccgtcagtgggcagagcgcacatcgcccacagtccccgagaagttggggggaggggtcggcaattgaaccggtgcctagagaaggtggcgcggggtaaactgggaaagtgatgtcgtgtactggctccgcctttttcccgagggtgggggagaaccgtatataagtgcagtagtcgccgtgaacgttctttttcgcaacgggtttgccgccagaacacaggtaagtgccgtgtgtggttcccgcgggcctggcctctttacgggttatggcccttgcgtgccttgaattacttccacctggctgcagtacgtgattcttgatcccgagcttcgggttggaagtgggtgggagagttcgaggccttgcgcttaaggagccccttcgcctcgtgcttgagttgaggcctggcctgggcgctggggccgccgcgtgcgaatctggtggcaccttcgcgcctgtctcgctgctttcgataagtctctagccatttaaaatttttgatgacctgctgcgacgctttttttctggcaagatagtcttgtaaatgcgggccaagatctgcacactggtatttcggtttttggggccgcgggcggcgacggggcccgtgcgtcccagcgcacatgttcggcgaggcggggcctgcgagcgcggccaccgagaatcggacgggggtagtctcaagctggccggcctgctctggtgcctggcctcgcgccgccgtgtatcgccccgccctgggcggcaaggctggcccggtcggcaccagttgcgtgagcggaaagatggccgcttcccggccctgctgcagggagctcaaaatggaggacgcggcgctcgggagagcgggcgggtgagtcacccacacaaaggaaaagggcctttccgtcctcagccgtcgcttcatgtgactccacggagtaccgggcgccgtccaggcacctcgattagttctcgagcttttggagtacgtcgtctttaggttggggggaggggttttatgcgatggagtttccccacactgagtgggtggagactgaagttaggccagcttggcacttgatgtaattctccttggaatttgccctttttgagtttggatcttggttcattctcaagcctcagacagtggttcaaagtttttttcttccatttcaggtgtcgtga

SEQ ID NO: 2 - protein, 21 aa, synthetic construct
  REGION 1..21: note = Description of Artificial Sequence: Synthetic peptide
MALPVTALLLPLALLLHAARP

SEQ ID NO: 3 - DNA, 63 bp, synthetic construct
  misc_feature 1..63: note = Description of Artificial Sequence: Synthetic oligonucleotide
  source 1..63: mol_type = other DNA
atggccctgcctgtgacagccctgctgctgcctctggctctgctgctgcatgccgctagaccc

SEQ ID NO: 4 - protein, 45 aa, synthetic construct
  REGION 1..45: note = Description of Artificial Sequence: Synthetic polypeptide
TTTPAPRPPTPAPTIASQPLSLRPEACRPAAGGAVHTRGLDFACD

SEQ ID NO: 5 - DNA, 135 bp, synthetic construct
  misc_feature 1..135: note = Description of Artificial Sequence: Synthetic polynucleotide
  source 1..135: mol_type = other DNA
accacgacgccagcgccgcgaccaccaacaccggcgcccaccatcgcgtcgcagcccctgtccctgcgcccagaggcgtgccggccagcggcggggggcgcagtgcacacgagggggctggacttcgcctgtgat

SEQ ID NO: 6 - protein, 230 aa, synthetic construct
  REGION 1..230: note = Description of Artificial Sequence: Synthetic polypeptide
ESKYGPPCPPCPAPEFLGGPSVFLFPPKPKDTLMISRTPEVTCVVVDVSQEDPEVQFNWYVDGVEVHNAKTKPREEQFNSTYRVVSVLTVLHQDWLNGKEYKCKVSNKGLPSSIEKTISKAKGQPREPQVYTLPPSQEEMTKNQVSLTCLVKGFYPSDIAVEWESNGQPENNYKTTPPVLDSDGSFFLYSRLTVDKSRWQEGNVFSCSVMHEALHNHYTQKSLSLSLGKM

SEQ ID NO: 7 - DNA, 690 bp, synthetic construct
  misc_feature 1..690: note = Description of Artificial Sequence: Synthetic polynucleotide
  source 1..690: mol_type = other DNA
gagagcaagtacggccctccctgccccccttgccctgcccccgagttcctgggcggacccagcgtgttcctgttcccccccaagcccaaggacaccctgatgatcagccggacccccgaggtgacctgtgtggtggtggacgtgtcccaggaggaccccgaggtccagttcaactggtacgtggacggcgtggaggtgcacaacgccaagaccaagccccgggaggagcagttcaatagcacctaccgggtggtgtccgtgctgaccgtgctgcaccaggactggctgaacggcaaggaatacaagtgtaaggtgtccaacaagggcctgcccagcagcatcgagaaaaccatcagcaaggccaagggccagcctcgggagccccaggtgtacaccctgccccctagccaagaggagatgaccaagaaccaggtgtccctgacctgcctggtgaagggcttctaccccagcgacatcgccgtggagtgggagagcaacggccagcccgagaacaactacaagaccaccccccctgtgctggacagcgacggcagcttcttcctgtacagccggctgaccgtggacaagagccggtggcaggagggcaacgtctttagctgctccgtgatgcacgaggccctgcacaaccactacacccagaagagcctgagcctgtccctgggcaagatg

SEQ ID NO: 8 - protein, 282 aa, synthetic construct
  REGION 1..282: note = Description of Artificial Sequence: Synthetic polypeptide
RWPESPKAQASSVPTAQPQAEGSLAKATTAPATTRNTGRGGEEKKKEKEKEEQEERETKTPECPSHTQPLGVYLLTPAVQDLWLRDKATFTCFVVGSDLKDAHLTWEVAGKVPTGGVEEGLLERHSNGSQSQHSRLTLPRSLWNAGTSVTCTLNHPSLPPQRLMALREPAAQAPVKLSLNLLASSDPPEAASWLLCEVSGFSPPNILLMWLEDQREVNTSGFAPARPPPQPGSTTFWAWSVLRVPAPPSPQPATYTCVVSHEDSRTLLNASRSLEVSYVTDH

SEQ ID NO: 9 - DNA, 847 bp, synthetic construct
  misc_feature 1..847: note = Description of Artificial Sequence: Synthetic polynucleotide
  source 1..847: mol_type = other DNA
aggtggcccgaaagtcccaaggcccaggcatctagtgttcctactgcacagccccaggcagaaggcagcctagccaaagctactactgcacctgccactacgcgcaatactggccgtggcggggaggagaagaaaaaggagaaagagaaagaagaacaggaagagagggagaccaagacccctgaatgtccatcccatacccagccgctgggcgtctatctcttgactcccgcagtacaggacttgtggcttagagataaggccacctttacatgtttcgtcgtgggctctgacctgaaggatgcccatttgacttgggaggttgccggaaaggtacccacagggggggttgaggaagggttgctggagcgccattccaatggctctcagagccagcactcaagactcacccttccgagatccctgtggaacgccgggacctctgtcacatgtactctaaatcatcctagcctgcccccacagcgtctgatggcccttagagagccagccgcccaggcaccagttaagcttagcctgaatctgctcgccagtagtgatcccccagaggccgccagctggctcttatgcgaagtgtccggctttagcccgcccaacatcttgctcatgtggctggaggaccagcgagaagtgaacaccagcggcttcgctccagcccggcccccaccccagccgggttctaccacattctgggcctggagtgtcttaagggtcccagcaccacctagcccccagccagccacatacacctgtgttgtgtcccatgaagatagcaggaccctgctaaatgcttctaggagtctggaggtttcctacgtgactgaccatt

SEQ ID NO: 10 - protein, 10 aa, synthetic construct
  REGION 1..10: note = Description of Artificial Sequence: Synthetic peptide
GGGGSGGGGS

SEQ ID NO: 11 - DNA, 30 bp, synthetic construct
  misc_feature 1..30: note = Description of Artificial Sequence: Synthetic oligonucleotide
  source 1..30: mol_type = other DNA
ggtggcggaggttctggaggtggaggttcc

SEQ ID NO: 12 - protein, 24 aa, synthetic construct
  REGION 1..24: note = Description of Artificial Sequence: Synthetic peptide
IYIWAPLAGTCGVLLLSLVITLYC

SEQ ID NO: 13 - DNA, 72 bp, synthetic construct
  misc_feature 1..72: note = Description of Artificial Sequence: Synthetic oligonucleotide
  source 1..72: mol_type = other DNA
atctacatctgggcgcccttggccgggacttgtggggtccttctcctgtcactggttatcaccctttactgc

SEQ ID NO: 14 - protein, 42 aa, synthetic construct
  REGION 1..42: note = Description of Artificial Sequence: Synthetic polypeptide
KRGRKKLLYIFKQPFMRPVQTTQEEDGCSCRFPEEEEGGCEL

SEQ ID NO: 15 - DNA, 126 bp, synthetic construct
  misc_feature 1..126: note = Description of Artificial Sequence: Synthetic polynucleotide
  source 1..126: mol_type = other DNA
aaacggggcagaaagaaactcctgtatatattcaaacaaccatttatgagaccagtacaaactactcaagaggaagatggctgtagctgccgatttccagaagaagaagaaggaggatgtgaactg

SEQ ID NO: 16 - protein, 48 aa, synthetic construct
  REGION 1..48: note = Description of Artificial Sequence: Synthetic polypeptide
QRRKYRSNKGESPVEPAEPCRYSCPREEEGSTIPIQEDYRKPEPACSP

SEQ ID NO: 17 - DNA, 123 bp, synthetic construct
  misc_feature 1..123: note = Description of Artificial Sequence: Synthetic polynucleotide
  source 1..123: mol_type = other DNA
aggagtaagaggagcaggctcctgcacagtgactacatgaacatgactccccgccgccccgggcccacccgcaagcattaccagccctatgccccaccacgcgacttcgcagcctatcgctcc

SEQ ID NO: 18 - protein, 112 aa, synthetic construct
  REGION 1..112: note = Description of Artificial Sequence: Synthetic polypeptide
RVKFSRSADAPAYKQGQNQLYNELNLGRREEYDVLDKRRGRDPEMGGKPRRKNPQEGLYNELQKDKMAEAYSEIGMKGERRRGKGHDGLYQGLSTATKDTYDALHMQALPPR

SEQ ID NO: 19 - DNA, 336 bp, synthetic construct
  misc_feature 1..336: note = Description of Artificial Sequence: Synthetic polynucleotide
  source 1..336: mol_type = other DNA
agagtgaagttcagcaggagcgcagacgcccccgcgtacaagcagggccagaaccagctctataacgagctcaatctaggacgaagagaggagtacgatgttttggacaagagacgtggccgggaccctgagatggggggaaagccgagaaggaagaaccctcaggaaggcctgtacaatgaactgcagaaagataagatggcggaggcctacagtgagattgggatgaaaggcgagcgccggaggggcaaggggcacgatggcctttaccagggtctcagtacagccaccaaggacacctacgacgcccttcacatgcaggccctgccccctcgc

SEQ ID NO: 20 - protein, 112 aa, synthetic construct
  REGION 1..112: note = Description of Artificial Sequence: Synthetic polypeptide
RVKFSRSADAPAYQQGQNQLYNELNLGRREEYDVLDKRRGRDPEMGGKPRRKNPQEGLYNELQKDKMAEAYSEIGMKGERRRGKGHDGLYQGLSTATKDTYDALHMQALPPR

SEQ ID NO: 21 - DNA, 336 bp, synthetic construct
  misc_feature 1..336: note = Description of Artificial Sequence: Synthetic polynucleotide
  source 1..336: mol_type = other DNA
agagtgaagttcagcaggagcgcagacgcccccgcgtaccagcagggccagaaccagctctataacgagctcaatctaggacgaagagaggagtacgatgttttggacaagagacgtggccgggaccctgagatggggggaaagccgagaaggaagaaccctcaggaaggcctgtacaatgaactgcagaaagataagatggcggaggcctacagtgagattgggatgaaaggcgagcgccggaggggcaaggggcacgatggcctttaccagggtctcagtacagccaccaaggacacctacgacgcccttcacatgcaggccctgccccctcgc

SEQ ID NO: 22 - protein, 5 aa, synthetic construct
  REGION 1..5: note = Description of Artificial Sequence: Synthetic peptide
GGGGS

SEQ ID NO: 23 - DNA, 30 bp, synthetic construct; identical to SEQ ID NO: 11
  misc_feature 1..30: note = Description of Artificial Sequence: Synthetic oligonucleotide
  source 1..30: mol_type = other DNA

SEQ ID NO: 24 - protein, 150 aa, synthetic construct [sequence omitted]

SEQ ID NO: 25 - DNA, 450 bp, synthetic construct
  misc_feature 1..450: note = Description of Artificial Sequence: Synthetic polynucleotide
  source 1..450: mol_type = other DNA
cccggatggtttctggactctccggatcgcccgtggaatcccccaaccttctcaccggcactcttggttgtgactgagggcgataatgcgaccttcacgtgctcgttctccaacacctccgaatcattcgtgctgaactggtaccgcatgagcccgtcaaaccagaccgacaagctcgccgcgtttccggaagatcggtcgcaaccgggacaggattgtcggttccgcgtgactcaactgccgaatggcagagacttccacatgagcgtggtccgcgctaggcgaaacgactccgggacctacctgtgcggagccatctcgctggcgcctaaggcccaaatcaaagagagcttgagggccgaactgagagtgaccgagcgcagagctgaggtgccaactgcacatccatccccatcgcctcggcctgcggggcagtttcagaccctggtc

SEQ ID NO: 26 - protein, 394 aa, synthetic construct
  REGION 1..394: note = Description of Artificial Sequence: Synthetic polypeptide
MALPVTALLLPLALLLHAARPPGWFLDSPDRPWNPPTFSPALLVVTEGDNATFTCSFSNTSESFVLNWYRMSPSNQTDKLAAFPEDRSQPGQDCRFRVTQLPNGRDFHMSVVRARRNDSGTYLCGAISLAPKAQIKESLRAELRVTERRAEVPTAHPSPSPRPAGQFQTLVTTTPAPRPPTPAPTIASQPLSLRPEACRPAAGGAVHTRGLDFACDIYIWAPLAGTCGVLLLSLVITLYCKRGRKKLLYIFKQPFMRPVQTTQEEDGCSCRFPEEEEGGCELRVKFSRSADAPAYKQGQNQLYNELNLGRREEYDVLDKRRGRDPEMGGKPRRKNPQEGLYNELQKDKMAEAYSEIGMKGERRRGKGHDGLYQGLSTATKDTYDALHMQALPPR

SEQ ID NO: 27 - DNA, 1182 bp, synthetic construct
  misc_feature 1..1182: note = Description of Artificial Sequence: Synthetic polynucleotide
  source 1..1182: mol_type = other DNA
atggccctccctgtcactgccctgcttctccccctcgcactcctgctccacgccgctagaccacccggatggtttctggactctccggatcgcccgtggaatcccccaaccttctcaccggcactcttggttgtgactgagggcgataatgcgaccttcacgtgctcgttctccaacacctccgaatcattcgtgctgaactggtaccgcatgagcccgtcaaaccagaccgacaagctcgccgcgtttccggaagatcggtcgcaaccgggacaggattgtcggttccgcgtgactcaactgccgaatggcagagacttccacatgagcgtggtccgcgctaggcgaaacgactccgggacctacctgtgcggagccatctcgctggcgcctaaggcccaaatcaaagagagcttgagggccgaactgagagtgaccgagcgcagagctgaggtgccaactgcacatccatccccatcgcctcggcctgcggggcagtttcagaccctggtcacgaccactccggcgccgcgcccaccgactccggccccaactatcgcgagccagcccctgtcgctgaggccggaagcatgccgccctgccgccggaggtgctgtgcatacccggggattggacttcgcatgcgacatctacatttgggctcctctcgccggaacttgtggcgtgctccttctgtccctggtcatcaccctgtactgcaagcggggtcggaaaaagcttctgtacattttcaagcagcccttcatgaggcccgtgcaaaccacccaggaggaggacggttgctcctgccggttccccgaagaggaagaaggaggttgcgagctgcgcgtgaagttctcccggagcgccgacgcccccgcctataagcagggccagaaccagctgtacaacgaactgaacctgggacggcgggaagagtacgatgtgctggacaagcggcgcggccgggaccccgaaatgggcgggaagcctagaagaaagaaccctcaggaaggcctgtataacgagctgcagaaggacaagatggccgaggcctactccgaaattgggatgaagggagagcggcggaggggaaaggggcacgacggcctgtaccaaggactgtccaccgccaccaaggacacatacgatgccctgcacatgcaggcccttccccctcgc

SEQ ID NO: 28 - protein, 40 aa, synthetic construct
  VARIANT 1..40: note = MISC_FEATURE - This sequence may encompass 1-10 Gly-Gly-Gly-Ser repeating units
  REGION 1..40: note = Description of Artificial Sequence: Synthetic polypeptide
GGGSGGGSGGGSGGGSGGGSGGGSGGGSGGGSGGGSGGGS

SEQ ID NO: 29 - protein, 20 aa, synthetic construct
  REGION 1..20: note = Description of Artificial Sequence: Synthetic peptide
GGGGSGGGGSGGGGSGGGGS

SEQ ID NO: 30 - protein, 15 aa, synthetic construct
  REGION 1..15: note = Description of Artificial Sequence: Synthetic peptide
GGGGSGGGGSGGGGS

SEQ ID NO: 31 - protein, 4 aa, synthetic construct
  REGION 1..4: note = Description of Artificial Sequence: Synthetic peptide
GGGS

SEQ ID NO: 32 - DNA, 2000 bp, synthetic construct
  misc_difference 1..2000: note = This sequence may encompass 50-2000 nucleotides
  misc_feature 1..2000: note = Description of Artificial Sequence: Synthetic polynucleotide
  misc_feature 1..2000: note = See specification as filed for detailed description ofsubstitutions and preferred embodiments
  source 1..2000: mol_type = other DNA
aaaaaaaaaaaaaaaaaaaaaaaaaaaaaaaaaaaaaaaaaaaaaaaaaaaaaaaaaaaaaaaaaaaaaaaaaaaaaaaaaaaaaaaaaaaaaaaaaaaaaaaaaaaaaaaaaaaaaaaaaaaaaaaaaaaaaaaaaaaaaaaaaaaaaaaaaaaaaaaaaaaaaaaaaaaaaaaaaaaaaaaaaaaaaaaaaaaaaaaaaaaaaaaaaaaaaaaaaaaaaaaaaaaaaaaaaaaaaaaaaaaaaaaaaaaaaaaaaaaaaaaaaaaaaaaaaaaaaaaaaaaaaaaaaaaaaaaaaaaaaaaaaaaaaaaaaaaaaaaaaaaaaaaaaaaaaaaaaaaaaaaaaaaaaaaaaaaaaaaaaaaaaaaaaaaaaaaaaaaaaaaaaaaaaaaaaaaaaaaaaaaaaaaaaaaaaaaaaaaaaaaaaaaaaaaaaaaaaaaaaaaaaaaaaaaaaaaaaaaaaaaaaaaaaaaaaaaaaaaaaaaaaaaaaaaaaaaaaaaaaaaaaaaaaaaaaaaaaaaaaaaaaaaaaaaaaaaaaaaaaaaaaaaaaaaaaaaaaaaaaaaaaaaaaaaaaaaaaaaaaaaaaaaaaaaaaaaaaaaaaaaaaaaaaaaaaaaaaaaaaaaaaaaaaaaaaaaaaaaaaaaaaaaaaaaaaaaaaaaaaaaaaaaaaaaaaaaaaaaaaaaaaaaaaaaaaaaaaaaaaaaaaaaaaaaaaaaaaaaaaaaaaaaaaaaaaaaaaaaaaaaaaaaaaaaaaaaaaaaaaaaaaaaaaaaaaaaaaaaaaaaaaaaaaaaaaaaaaaaaaaaaaaaaaaaaaaaaaaaaaaaaaaaaaaaaaaaaaaaaaaaaaaaaaaaaaaaaaaaaaaaaaaaaaaaaaaaaaaaaaaaaaaaaaaaaaaaaaaaaaaaaaaaaaaaaaaaaaaaaaaaaaaaaaaaaaaaaaaaaaaaaaaaaaaaaaaaaaaaaaaaaaaaaaaaaaaaaaaaaaaaaaaaaaaaaaaaaaaaaaaaaaaaaaaaaaaaaaaaaaaaaaaaaaaaaaaaaaaaaaaaaaaaaaaaaaaaaaaaaaaaaaaaaaaaaaaaaaaaaaaaaaaaaaaaaaaaaaaaaaaaaaaaaaaaaaaaaaaaaaaaaaaaaaaaaaaaaaaaaaaaaaaaaaaaaaaaaaaaaaaaaaaaaaaaaaaaaaaaaaaaaaaaaaaaaaaaaaaaaaaaaaaaaaaaaaaaaaaaaaaaaaaaaaaaaaaaaaaaaaaaaaaaaaaaaaaaaaaaaaaaaaaaaaaaaaaaaaaaaaaaaaaaaaaaaaaaaaaaaaaaaaaaaaaaaaaaaaaaaaaaaaaaaaaaaaaaaaaaaaaaaaaaaaaaaaaaaaaaaaaaaaaaaaaaaaaaaaaaaaaaaaaaaaaaaaaaaaaaaaaaaaaaaaaaaaaaaaaaaaaaaaaaaaaaaaaaaaaaaaaaaaaaaaaaaaaaaaaaaaaaaaaaaaaaaaaaaaaaaaaaaaaaaaaaaaaaaaaaaaaaaaaaaaaaaaaaaaaaaaaaaaaaaaaaaaaaaaaaaaaaaaaaaaaaaaaaaaaaaaaaaaaaaaaaaaaaaaaaaaaaaaaaaaaaaaaaaaaaaaaaaaaaaaaaaaaaaaaaaaaaaaaaaaaaaaaaaaaaaaaaaaaaaaaaaaaaaaaaaaaaaaaaaaaaaaaaaaaaaaaaaaaaaaaaaaaaaaaaaaaaaaaaaaaaaaaaaaaaaaaaaaaaaaaaaaaaaaaaaaaaaaaaaaaaaaaaaaaaaaaaaaaaaaaaaaaaaaaaaaaaaaaaaaaaaaaaaaaaaaaaaaaaaaaaaaaaaaaaaaaaaaaaaaaaaaaaaaaaaaaaaaaaaaaaaaaaaaaaaaaaaaaaaaaaaaaaaaaaaaaaaaaaaaaaaaaaaaaaaaaaaaaaaaaaaaaaaaaaaaaaaaaaaaaaaaaaaaaaaaaaaaaaaaaaaaaaaaaaaaaaaaaaaaaaaaaaaaaaaaaaaaaaaaaaaaaaaaaaa

SEQ ID NO: 33 - DNA, 150 bp, synthetic construct
  misc_feature 1..150: note = Description of Artificial Sequence: Synthetic polynucleotide
  source 1..150: mol_type = other DNA
aaaaaaaaaaaaaaaaaaaaaaaaaaaaaaaaaaaaaaaaaaaaaaaaaaaaaaaaaaaaaaaaaaaaaaaaaaaaaaaaaaaaaaaaaaaaaaaaaaaaaaaaaaaaaaaaaaaaaaaaaaaaaaaaaaaaaaaaaaaaaaaaaaaaaa

SEQ ID NO: 34 - DNA, 5000 bp, synthetic construct
  misc_difference 1..5000: note = This sequence may encompass 50-5000 nucleotides
  misc_feature 1..5000: note = Description of Artificial Sequence: Synthetic polynucleotide
  misc_feature 1..5000: note = See specification as filed for detailed description ofsubstitutions and preferred embodiments
  source 1..5000: mol_type = other DNA
aaaaaaaaaaaaaaaaaaaaaaaaaaaaaaaaaaaaaaaaaaaaaaaaaaaaaaaaaaaaaaaaaaaaaaaaaaaaaaaaaaaaaaaaaaaaaaaaaaaaaaaaaaaaaaaaaaaaaaaaaaaaaaaaaaaaaaaaaaaaaaaaaaaaaaaaaaaaaaaaaaaaaaaaaaaaaaaaaaaaaaaaaaaaaaaaaaaaaaaaaaaaaaaaaaaaaaaaaaaaaaaaaaaaaaaaaaaaaaaaaaaaaaaaaaaaaaaaaaaaaaaaaaaaaaaaaaaaaaaaaaaaaaaaaaaaaaaaaaaaaaaaaaaaaaaaaaaaaaaaaaaaaaaaaaaaaaaaaaaaaaaaaaaaaaaaaaaaaaaaaaaaaaaaaaaaaaaaaaaaaaaaaaaaaaaaaaaaaaaaaaaaaaaaaaaaaaaaaaaaaaaaaaaaaaaaaaaaaaaaaaaaaaaaaaaaaaaaaaaaaaaaaaaaaaaaaaaaaaaaaaaaaaaaaaaaaaaaaaaaaaaaaaaaaaaaaaaaaaaaaaaaaaaaaaaaaaaaaaaaaaaaaaaaaaaaaaaaaaaaaaaaaaaaaaaaaaaaaaaaaaaaaaaaaaaaaaaaaaaaaaaaaaaaaaaaaaaaaaaaaaaaaaaaaaaaaaaaaaaaaaaaaaaaaaaaaaaaaaaaaaaaaaaaaaaaaaaaaaaaaaaaaaaaaaaaaaaaaaaaaaaaaaaaaaaaaaaaaaaaaaaaaaaaaaaaaaaaaaaaaaaaaaaaaaaaaaaaaaaaaaaaaaaaaaaaaaaaaaaaaaaaaaaaaaaaaaaaaaaaaaaaaaaaaaaaaaaaaaaaaaaaaaaaaaaaaaaaaaaaaaaaaaaaaaaaaaaaaaaaaaaaaaaaaaaaaaaaaaaaaaaaaaaaaaaaaaaaaaaaaaaaaaaaaaaaaaaaaaaaaaaaaaaaaaaaaaaaaaaaaaaaaaaaaaaaaaaaaaaaaaaaaaaaaaaaaaaaaaaaaaaaaaaaaaaaaaaaaaaaaaaaaaaaaaaaaaaaaaaaaaaaaaaaaaaaaaaaaaaaaaaaaaaaaaaaaaaaaaaaaaaaaaaaaaaaaaaaaaaaaaaaaaaaaaaaaaaaaaaaaaaaaaaaaaaaaaaaaaaaaaaaaaaaaaaaaaaaaaaaaaaaaaaaaaaaaaaaaaaaaaaaaaaaaaaaaaaaaaaaaaaaaaaaaaaaaaaaaaaaaaaaaaaaaaaaaaaaaaaaaaaaaaaaaaaaaaaaaaaaaaaaaaaaaaaaaaaaaaaaaaaaaaaaaaaaaaaaaaaaaaaaaaaaaaaaaaaaaaaaaaaaaaaaaaaaaaaaaaaaaaaaaaaaaaaaaaaaaaaaaaaaaaaaaaaaaaaaaaaaaaaaaaaaaaaaaaaaaaaaaaaaaaaaaaaaaaaaaaaaaaaaaaaaaaaaaaaaaaaaaaaaaaaaaaaaaaaaaaaaaaaaaaaaaaaaaaaaaaaaaaaaaaaaaaaaaaaaaaaaaaaaaaaaaaaaaaaaaaaaaaaaaaaaaaaaaaaaaaaaaaaaaaaaaaaaaaaaaaaaaaaaaaaaaaaaaaaaaaaaaaaaaaaaaaaaaaaaaaaaaaaaaaaaaaaaaaaaaaaaaaaaaaaaaaaaaaaaaaaaaaaaaaaaaaaaaaaaaaaaaaaaaaaaaaaaaaaaaaaaaaaaaaaaaaaaaaaaaaaaaaaaaaaaaaaaaaaaaaaaaaaaaaaaaaaaaaaaaaaaaaaaaaaaaaaaaaaaaaaaaaaaaaaaaaaaaaaaaaaaaaaaaaaaaaaaaaaaaaaaaaaaaaaaaaaaaaaaaaaaaaaaaaaaaaaaaaaaaaaaaaaaaaaaaaaaaaaaaaaaaaaaaaaaaaaaaaaaaaaaaaaaaaaaaaaaaaaaaaaaaaaaaaaaaaaaaaaaaaaaaaaaaaaaaaaaaaaaaaaaaaaaaaaaaaaaaaaaaaaaaaaaaaaaaaaaaaaaaaaaaaaaaaaaaaaaaaaaaaaaaaaaaaaaaaaaaaaaaaaaaaaaaaaaaaaaaaaaaaaaaaaaaaaaaaaaaaaaaaaaaaaaaaaaaaaaaaaaaaaaaaaaaaaaaaaaaaaaaaaaaaaaaaaaaaaaaaaaaaaaaaaaaaaaaaaaaaaaaaaaaaaaaaaaaaaaaaaaaaaaaaaaaaaaaaaaaaaaaaaaaaaaaaaaaaaaaaaaaaaaaaaaaaaaaaaaaaaaaaaaaaaaaaaaaaaaaaaaaaaaaaaaaaaaaaaaaaaaaaaaaaaaaaaaaaaaaaaaaaaaaaaaaaaaaaaaaaaaaaaaaaaaaaaaaaaaaaaaaaaaaaaaaaaaaaaaaaaaaaaaaaaaaaaaaaaaaaaaaaaaaaaaaaaaaaaaaaaaaaaaaaaaaaaaaaaaaaaaaaaaaaaaaaaaaaaaaaaaaaaaaaaaaaaaaaaaaaaaaaaaaaaaaaaaaaaaaaaaaaaaaaaaaaaaaaaaaaaaaaaaaaaaaaaaaaaaaaaaaaaaaaaaaaaaaaaaaaaaaaaaaaaaaaaaaaaaaaaaaaaaaaaaaaaaaaaaaaaaaaaaaaaaaaaaaaaaaaaaaaaaaaaaaaaaaaaaaaaaaaaaaaaaaaaaaaaaaaaaaaaaaaaaaaaaaaaaaaaaaaaaaaaaaaaaaaaaaaaaaaaaaaaaaaaaaaaaaaaaaaaaaaaaaaaaaaaaaaaaaaaaaaaaaaaaaaaaaaaaaaaaaaaaaaaaaaaaaaaaaaaaaaaaaaaaaaaaaaaaaaaaaaaaaaaaaaaaaaaaaaaaaaaaaaaaaaaaaaaaaaaaaaaaaaaaaaaaaaaaaaaaaaaaaaaaaaaaaaaaaaaaaaaaaaaaaaaaaaaaaaaaaaaaaaaaaaaaaaaaaaaaaaaaaaaaaaaaaaaaaaaaaaaaaaaaaaaaaaaaaaaaaaaaaaaaaaaaaaaaaaaaaaaaaaaaaaaaaaaaaaaaaaaaaaaaaaaaaaaaaaaaaaaaaaaaaaaaaaaaaaaaaaaaaaaaaaaaaaaaaaaaaaaaaaaaaaaaaaaaaaaaaaaaaaaaaaaaaaaaaaaaaaaaaaaaaaaaaaaaaaaaaaaaaaaaaaaaaaaaaaaaaaaaaaaaaaaaaaaaaaaaaaaaaaaaaaaaaaaaaaaaaaaaaaaaaaaaaaaaaaaaaaaaaaaaaaaaaaaaaaaaaaaaaaaaaaaaaaaaaaaaaaaaaaaaaaaaaaaaaaaaaaaaaaaaaaaaaaaaaaaaaaaaaaaaaaaaaaaaaaaaaaaaaaaaaaaaaaaaaaaaaaaaaaaaaaaaaaaaaaaaaaaaaaaaaaaaaaaaaaaaaaaaaaaaaaaaaaaaaaaaaaaaaaaaaaaaaaaaaaaaaaaaaaaaaaaaaaaaaaaaaaaaaaaaaaaaaaaaaaaaaaaaaaaaaaaaaaaaaaaaaaaaaaaaaaaaaaaaaaaaaaaaaaaaaaaaaaaaaaaaaaaaaaaaaaaaaaaaaaaaaaaaaaaaaaaaaaaaaaaaaaaaaaaaaaaaaaaaaaaaaaaaaaaaaaaaaaaaaaaaaaaaaaaaaaaaaaaaaaaaaaaaaaaaaaaaaaaaaaaaaaaaaaaaaaaaaaaaaaaaaaaaaaaaaaaaaaaaaaaaaaaaaaaaaaaaaaaaaaaaaaaaaaaaaaaaaaaaaaaaaaaaaaaaaaaaaaaaaaaaaaaaaaaaaaaaaaaaaaaaaaaaaaaaaaaaaaaaaaaaaaaaaaaaaaaaaaaaaaaaaaaaaaaaaaaaaaaaaaaaaaaaaaaaaaaaaaaaaaaaaaaaaaaaaaaaaaaaaaaaaaaaaaaaaaaaaaaaaaaaaaaaaaaaaaaaaaaaaaaaaaaaaaaaaaaaaaaaaaaaaaaaaaaaaaaaaaaaaaaaaaaaaaaaaaaaaaaaaaaaaaaaaaaaaaaaaaaaaaaaaaaaaaaaaaaaaaaaaaaaaaaaaaaaaaaaaaaaaaaaaaaaaaaaaaaaaaaaaaaaaaaaaaaaaaaaaaaaaaaaaaaaaaaaaaaaaaaaaaaaaaaaaaaaaaaaaaaaaaaaaaaaaaaaaaaaaaaaaaaaaaaaaaaaaaaaaaaaaaaaaaaaaaaaaaaaaaaaaaaaaaaaaaaaaaaaaaaaaaaaaaaaaaaaaaaaaaaaaaaaaaaaaaaaaaaaaaaaaaaaaaaaaaaaaaaaaaaaaaaaaaaaaaaaaaaaaaaaaaaaaaaaaaaaaaaaaaaaaaaaaaaaaaaaaaaaaaaaaaaaaaaaaaaaaaaaaaaaaaaaaaaaaaaaaaaaaaaaaaaaaaaaaaaaaaaaaaaaaaaaaaaaaaaaaaaaaaaaaaaaaaaaaaaaaaaaaaaaaaaaaaaaaaaaaaaaaaaaaaaaaaaaaaaaaaaaaaaaaaaaaaaaaaaaaaaaaaaaaaaaaaaaaaaaaaaaaaaaaaaaaaaaaaaaaaaaaaaaaaaaaaaaaaaaaaaaaaaaaaaaaaaaaaaaaaaaaaaaaaaaaaaaaaaaaaaaaaaaaaaaaaaaaaaaaaaaaaaaaaaaaaaaaaaaaaaaaaaaaaaaaaaaaaaaaaaaaaaaaaaaaaaaaaaaaaaaaaaaaaaaaaaaaaaaaaaaaaaaaaaaaaaaaaaaaaaaaaaaaaaaaaaaaaaaaaaaaaaaaaaaaaaaaaaaaaaaaaaaaaaaaaaaaaaaaaaaaaaaaaaaaaaaaaaaaaaaaaaaaaaaaaaaaaaaaaaaaaaaaaaaaaaaaaaaaaaaaaaaaaaaaaaaaaaaaaaaaaaaaaaaaaaaaaaaaaaaaaaaaaaaaaaaaaaaaaaaaaaaaaaaaaaaaaaaaaaaaaaaaaaaaaaaaaaaaaaaaaaaaaaaaaaaaaaaaaaaaaaaaaaaaaaaaaaaaaaaaaaaaaaaaaaaaaaaaaaaaaaaaaaaaaaaaaaaaaaaaaaaaaaaaaaaaaaaaaaaaaaaaaaaaaaaaaaaaaaaaaaaaaaaaaaaaaaaaaaaaaaaaaaaaaaaaaaaaaaaaaaaaaaaaaaaaaaaaaaaaaaaaaaa

SEQ ID NO: 35 - DNA, 100 bp, synthetic construct
  misc_feature 1..100: note = Description of Artificial Sequence: Synthetic polynucleotide
  source 1..100: mol_type = other DNA
tttttttttttttttttttttttttttttttttttttttttttttttttttttttttttttttttttttttttttttttttttttttttttttttttttt

SEQ ID NO: 36 - DNA, 5000 bp, synthetic construct
  misc_difference 1..5000: note = This sequence may encompass 50-5000 nucleotides
  misc_feature 1..5000: note = Description of Artificial Sequence: Synthetic polynucleotide
  misc_feature 1..5000: note = See specification as filed for detailed description ofsubstitutions and preferred embodiments
  source 1..5000: mol_type = other DNA
tttttttttttttttttttttttttttttttttttttttttttttttttttttttttttttttttttttttttttttttttttttttttttttttttttttttttttttttttttttttttttttttttttttttttttttttttttttttttttttttttttttttttttttttttttttttttttttttttttttttttttttttttttttttttttttttttttttttttttttttttttttttttttttttttttttttttttttttttttttttttttttttttttttttttttttttttttttttttttttttttttttttttttttttttttttttttttttttttttttttttttttttttttttttttttttttttttttttttttttttttttttttttttttttttttttttttttttttttttttttttttttttttttttttttttttttttttttttttttttttttttttttttttttttttttttttttttttttttttttttttttttttttttttttttttttttttttttttttttttttttttttttttttttttttttttttttttttttttttttttttttttttttttttttttttttttttttttttttttttttttttttttttttttttttttttttttttttttttttttttttttttttttttttttttttttttttttttttttttttttttttttttttttttttttttttttttttttttttttttttttttttttttttttttttttttttttttttttttttttttttttttttttttttttttttttttttttttttttttttttttttttttttttttttttttttttttttttttttttttttttttttttttttttttttttttttttttttttttttttttttttttttttttttttttttttttttttttttttttttttttttttttttttttttttttttttttttttttttttttttttttttttttttttttttttttttttttttttttttttttttttttttttttttttttttttttttttttttttttttttttttttttttttttttttttttttttttttttttttttttttttttttttttttttttttttttttttttttttttttttttttttttttttttttttttttttttttttttttttttttttttttttttttttttttttttttttttttttttttttttttttttttttttttttttttttttttttttttttttttttttttttttttttttttttttttttttttttttttttttttttttttttttttttttttttttttttttttttttttttttttttttttttttttttttttttttttttttttttttttttttttttttttttttttttttttttttttttttttttttttttttttttttttttttttttttttttttttttttttttttttttttttttttttttttttttttttttttttttttttttttttttttttttttttttttttttttttttttttttttttttttttttttttttttttttttttttttttttttttttttttttttttttttttttttttttttttttttttttttttttttttttttttttttttttttttttttttttttttttttttttttttttttttttttttttttttttttttttttttttttttttttttttttttttttttttttttttttttttttttttttttttttttttttttttttttttttttttttttttttttttttttttttttttttttttttttttttttttttttttttttttttttttttttttttttttttttttttttttttttttttttttttttttttttttttttttttttttttttttttttttttttttttttttttttttttttttttttttttttttttttttttttttttttttttttttttttttttttttttttttttttttttttttttttttttttttttttttttttttttttttttttttttttttttttttttttttttttttttttttttttttttttttttttttttttttttttttttttttttttttttttttttttttttttttttttttttttttttttttttttttttttttttttttttttttttttttttttttttttttttttttttttttttttttttttttttttttttttttttttttttttttttttttttttttttttttttttttttttttttttttttttttttttttttttttttttttttttttttttttttttttttttttttttttttttttttttttttttttttttttttttttttttttttttttttttttttttttttttttttttttttttttttttttttttttttttttttttttttttttttttttttttttttttttttttttttttttttttttttttttttttttttttttttttttttttttttttttttttttttttttttttttttttttttttttttttttttttttttttttttttttttttttttttttttttttttttttttttttttttttttttttttttttttttttttttttttttttttttttttttttttttttttttttttttttttttttttttttttttttttttttttttttttttttttttttttttttttttttttttttttttttttttttttttttttttttttttttttttttttttttttttttttttttttttttttttttttttttttttttttttttttttttttttttttttttttttttttttttttttttttttttttttttttttttttttttttttttttttttttttttttttttttttttttttttttttttttttttttttttttttttttttttttttttttttttttttttttttttttttttttttttttttttttttttttttttttttttttttttttttttttttttttttttttttttttttttttttttttttttttttttttttttttttttttttttttttttttttttttttttttttttttttttttttttttttttttttttttttttttttttttttttttttttttttttttttttttttttttttttttttttttttttttttttttttttttttttttttttttttttttttttttttttttttttttttttttttttttttttttttttttttttttttttttttttttttttttttttttttttttttttttttttttttttttttttttttttttttttttttttttttttttttttttttttttttttttttttttttttttttttttttttttttttttttttttttttttttttttttttttttttttttttttttttttttttttttttttttttttttttttttttttttttttttttttttttttttttttttttttttttttttttttttttttttttttttttttttttttttttttttttttttttttttttttttttttttttttttttttttttttttttttttttttttttttttttttttttttttttttttttttttttttttttttttttttttttttttttttttttttttttttttttttttttttttttttttttttttttttttttttttttttttttttttttttttttttttttttttttttttttttttttttttttttttttttttttttttttttttttttttttttttttttttttttttttttttttttttttttttttttttttttttttttttttttttttttttttttttttttttttttttttttttttttttttttttttttttttttttttttttttttttttttttttttttttttttttttttttttttttttttttttttttttttttttttttttttttttttttttttttttttttttttttttttttttttttttttttttttttttttttttttttttttttttttttttttttttttttttttttttttttttttttttttttttttttttttttttttttttttttttttttttttttttttttttttttttttttttttttttttttttttttttttttttttttttttttttttttttttttttttttttttttttttttttttttttttttttttttttttttttttttttttttttttttttttttttttttttttttttttttttttttttttttttttttttttttttttttttttttttttttttttttttttttttttttttttttttttttttttttttttttttttttttttttttttttttttttttttttttttttttttttttttttttttttttttttttttttttttttttttttttttttttttttttttttttttttttttttttttttttttttttttttttttttttttttttttttttttttttttttttttttttttttttttttttttttttttttttttttttttttttttttttttttttttttttttttttttttttttttttttttttttttttttttttttttttttttttttttttttttttttttttttttttttttttttttttttttttttttttttttttttttttttttttttttttttttttttttttttttttttttttttttttttttttttttttttttttttttttttttttttttttttttttttttttttttttttttttttttttttttttttttttttttttttttttttttttttttttttttttttttttttttttttttttttttttttttttttttttttttttttttttttttttttttttttttttttttttttttttttttttttttttttttttttttttttttttttttttttttttttttttttttttttttttttttttttttttttttttttttttttttttttttttttttttttttttttttttttttt

SEQ ID NO: 37 - DNA, 5000 bp, synthetic construct; identical to SEQ ID NO: 34
  misc_difference 1..5000: note = This sequence may encompass 100-5000 nucleotides
  misc_feature 1..5000: note = Description of Artificial Sequence: Synthetic polynucleotide
  misc_feature 1..5000: note = See specification as filed for detailed description ofsubstitutions and preferred embodiments
  source 1..5000: mol_type = other DNA

SEQ ID NO: 38 - DNA, 400 bp, synthetic construct
  misc_difference 1..400: note = This sequence may encompass 100-400 nucleotides
  misc_feature 1..400: note = Description of Artificial Sequence: Synthetic polynucleotide
  misc_feature 1..400: note = See specification as filed for detailed description ofsubstitutions and preferred embodiments
  source 1..400: mol_type = other DNA
aaaaaaaaaaaaaaaaaaaaaaaaaaaaaaaaaaaaaaaaaaaaaaaaaaaaaaaaaaaaaaaaaaaaaaaaaaaaaaaaaaaaaaaaaaaaaaaaaaaaaaaaaaaaaaaaaaaaaaaaaaaaaaaaaaaaaaaaaaaaaaaaaaaaaaaaaaaaaaaaaaaaaaaaaaaaaaaaaaaaaaaaaaaaaaaaaaaaaaaaaaaaaaaaaaaaaaaaaaaaaaaaaaaaaaaaaaaaaaaaaaaaaaaaaaaaaaaaaaaaaaaaaaaaaaaaaaaaaaaaaaaaaaaaaaaaaaaaaaaaaaaaaaaaaaaaaaaaaaaaaaaaaaaaaaaaaaaaaaaaaaaaaaaaaaaaaaaaaaaaaaaaaaaaaaaaaaaaaaaaaaaaaaaaaaaaaaaaaaaa

SEQ ID NO: 39 - protein, 373 aa, synthetic construct
  REGION 1..373: note = Description of Artificial Sequence: Synthetic polypeptide
PGWFLDSPDRPWNPPTFSPALLVVTEGDNATFTCSFSNTSESFVLNWYRMSPSNQTDKLAAFPEDRSQPGQDCRFRVTQLPNGRDFHMSVVRARRNDSGTYLCGAISLAPKAQIKESLRAELRVTERRAEVPTAHPSPSPRPAGQFQTLVTTTPAPRPPTPAPTIASQPLSLRPEACRPAAGGAVHTRGLDFACDIYIWAPLAGTCGVLLLSLVITLYCKRGRKKLLYIFKQPFMRPVQTTQEEDGCSCRFPEEEEGGCELRVKFSRSADAPAYKQGQNQLYNELNLGRREEYDVLDKRRGRDPEMGGKPRRKNPQEGLYNELQKDKMAEAYSEIGMKGERRRGKGHDGLYQGLSTATKDTYDALHMQALPPR

SEQ ID NO: 40 - RNA, 42 nt, synthetic construct
  misc_difference 1..20: note = a, c, u, g, unknown or other
  misc_feature 1..42: note = Description of Artificial Sequence: Synthetic oligonucleotide
  source 1..42: mol_type = other RNA
nnnnnnnnnnnnnnnnnnnngttttagagctatgctgttttg

SEQ ID NO: 41 - RNA, 86 nt, synthetic construct
  misc_difference 80..86: note = This region may encompass 1-7 nucleotides
  misc_feature 1..86: note = Description of Artificial Sequence: Synthetic oligonucleotide
  misc_feature 1..86: note = See specification as filed for detailed description ofsubstitutions and preferred embodiments
  source 1..86: mol_type = other RNA
aacttaccaaggaacagcatagcaagttaaaataaggctagtccgttatcaacttgaaaaagtggcaccgagtcggtgcttttttt

SEQ ID NO: 42 - RNA, 74 nt, synthetic construct
  misc_difference 68..74: note = This region may encompass 1-7 nucleotides
  misc_feature 1..74: note = Description of Artificial Sequence: Synthetic oligonucleotide
  misc_feature 1..74: note = See specification as filed for detailed description ofsubstitutions and preferred embodiments
  source 1..74: mol_type = other RNA
aacagcatagcaagttaaaataaggctagtccgttatcaacttgaaaaagtggcaccgagtcggtgcttttttt

SEQ ID NO: 43 - RNA, 103 nt, synthetic construct
  misc_difference 1..20: note = a, c, u, g, unknown or other
  misc_difference 97..103: note = This region may encompass 1-7 nucleotides
  misc_feature 1..103: note = Description of Artificial Sequence: Synthetic polynucleotide
  misc_feature 1..103: note = See specification as filed for detailed description ofsubstitutions and preferred embodiments
  source 1..103: mol_type = other RNA
nnnnnnnnnnnnnnnnnnnngttttagagctagaaatagcaagttaaaataaggctagtccgttatcaacttgaaaaagtggcaccgagtcggtgcttttttt

SEQ ID NO: 44 - RNA, 20 nt, synthetic construct
  misc_feature 1..20: note = Description of Artificial Sequence: Synthetic oligonucleotide
  source 1..20: mol_type = other RNA
ccttggacaccttctcctcc

SEQ ID NO: 45 - RNA, 20 nt, synthetic construct
  misc_feature 1..20: note = Description of Artificial Sequence: Synthetic oligonucleotide
  source 1..20: mol_type = other RNA
ggaacctgtggaagaggagg

SEQ ID NO: 46 - DNA, 20 bp, synthetic construct
  misc_feature 1..20: note = Description of Artificial Sequence: Synthetic oligonucleotide
  source 1..20: mol_type = other DNA
ggaacctgtggaagaggagg

SEQ ID NO: 47 - DNA, 20 bp, synthetic construct
  misc_feature 1..20: note = Description of Artificial Sequence: Synthetic oligonucleotide
  source 1..20: mol_type = other DNA
gaaggaagctgaggaacctg

SEQ ID NO: 48 - DNA, 20 bp, synthetic construct
  misc_feature 1..20: note = Description of Artificial Sequence: Synthetic oligonucleotide
  source 1..20: mol_type = other DNA
atgacctccaaacaatacac

SEQ ID NO: 49 - DNA, 20 bp, synthetic construct
  misc_feature 1..20: note = Description of Artificial Sequence: Synthetic oligonucleotide
  source 1..20: mol_type = other DNA
caagtgctgtttcaacactg

SEQ ID NO: 50 - DNA, 20 bp, synthetic construct
  misc_feature 1..20: note = Description of Artificial Sequence: Synthetic oligonucleotide
  source 1..20: mol_type = other DNA
gggagatgtgaactctggga

SEQ ID NO: 51 - DNA, 20 bp, synthetic construct
  misc_feature 1..20: note = Description of Artificial Sequence: Synthetic oligonucleotide
  source 1..20: mol_type = other DNA
ggaggtgatggtatcaggaa

SEQ ID NO: 52 - DNA, 20 bp, synthetic construct
  misc_feature 1..20: note = Description of Artificial Sequence: Synthetic oligonucleotide
  source 1..20: mol_type = other DNA
ggttctgtctggcaaatggg

SEQ ID NO: 53 - DNA, 20 bp, synthetic construct
  misc_feature 1..20: note = Description of Artificial Sequence: Synthetic oligonucleotide
  source 1..20: mol_type = other DNA
ggatgagctctctcaggcag

SEQ ID NO: 54 - protein, 132 aa, synthetic construct
  REGION 1..132: note = Description of Artificial Sequence: Synthetic polypeptide
DVPDYASLGGPSSPKKKRKVSRGVQVETISPGDGRTFPKRGQTCVVHYTGMLEDGKKFDSSRDRNKPFKFMLGKQEVIRGWEEGVAQMSVGQRAKLTISPDYAYGATGHPGIIPPHATLVFDVELLKLETSY

SEQ ID NO: 55 - protein, 108 aa, synthetic construct
  REGION 1..108: note = Description of Artificial Sequence: Synthetic polypeptide
VQVETISPGDGRTFPKRGQTCVVHYTGMLEDGKKFDSSRDRNKPFKFMLGKQEVIRGWEEGVAQMSVGQRAKLTISPDYAYGATGHPGIIPPHATLVFDVELLKLETS

SEQ ID NO: 56 - protein, 93 aa, synthetic construct [sequence omitted]

SEQ ID NO: 57 - protein, 95 aa, synthetic construct
  REGION 1..95: note = Description of Artificial Sequence: Synthetic polypeptide
ILWHEMWHEGLIEASRLYFGERNVKGMFEVLEPLHAMMERGPQTLKETSFNQAYGRDLMEAQEWCRKYMKSGNVKDLTQAWDLYYHVFRRISKTS

SEQ ID NO: 58 - protein, 95 aa, synthetic construct
  REGION 1..95: note = Description of Artificial Sequence: Synthetic polypeptide
ILWHEMWHEGLLEASRLYFGERNVKGMFEVLEPLHAMMERGPQTLKETSFNQAYGRDLMEAQEWCRKYMKSGNVKDLTQAWDLYYHVFRRISKTS

SEQ ID NO: 59 - protein, 95 aa, synthetic construct
  REGION 1..95: note = Description of Artificial Sequence: Synthetic polypeptide
ILWHEMWHEGLEEASRLYFGERNVKGMFEVLEPLHAMMERGPQTLKETSFNQAYGRDLMEAQEWCRKYMKSGNVKDLLQAWDLYYHVFRRISKTS

SEQ ID NO: 60 - protein, 95 aa, synthetic construct
  VARIANT 12: note = Any amino acid
  VARIANT 78: note = Any amino acid
  REGION 1..95: note = Description of Artificial Sequence: Synthetic polypeptide
ILWHEMWHEGLXEASRLYFGERNVKGMFEVLEPLHAMMERGPQTLKETSFNQAYGRDLMEAQEWCRKYMKSGNVKDLXQAWDLYYHVFRRISKTS

SEQ ID NO: 61 - protein, 95 aa, synthetic construct
  REGION 1..95: note = Description of Artificial Sequence: Synthetic polypeptide
ILWHEMWHEGLIEASRLYFGERNVKGMFEVLEPLHAMMERGPQTLKETSFNQAYGRDLMEAQEWCRKYMKSGNVKDLLQAWDLYYHVFRRISKTS

SEQ ID NO: 62 - protein, 95 aa, synthetic construct
  REGION 1..95: note = Description of Artificial Sequence: Synthetic polypeptide
ILWHEMWHEGLLEASRLYFGERNVKGMFEVLEPLHAMMERGPQTLKETSFNQAYGRDLMEAQEWCRKYMKSGNVKDLLQAWDLYYHVFRRISKTS

SEQ ID NO: 63 - protein, 1132 aa, Homo sapiens [sequence omitted]

SEQ ID NO: 64 - DNA, 4027 bp, Homo sapiens
  source 1..4027: mol_type = genomic DNA
caggcagcgtggtcctgctgcgcacgtgggaagccctggccccggccacccccgcgatgccgcgcgctccccgctgccgagccgtgcgctccctgctgcgcagccactaccgcgaggtgctgccgctggccacgttcgtgcggcgcctggggccccagggctggcggctggtgcagcgcggggacccggcggctttccgcgcgctggtggcccagtgcctggtgtgcgtgccctgggacgcacggccgccccccgccgccccctccttccgccaggtgtcctgcctgaaggagctggtggcccgagtgctgcagaggctgtgcgagcgcggcgcgaagaacgtgctggccttcggcttcgcgctgctggacggggcccgcgggggcccccccgaggccttcaccaccagcgtgcgcagctacctgcccaacacggtgaccgacgcactgcgggggagcggggcgtgggggctgctgttgcgccgcgtgggcgacgacgtgctggttcacctgctggcacgctgcgcgctctttgtgctggtggctcccagctgcgcctaccaggtgtgcgggccgccgctgtaccagctcggcgctgccactcaggcccggcccccgccacacgctagtggaccccgaaggcgtctgggatgcgaacgggcctggaaccatagcgtcagggaggccggggtccccctgggcctgccagccccgggtgcgaggaggcgcgggggcagtgccagccgaagtctgccgttgcccaagaggcccaggcgtggcgctgcccctgagccggagcggacgcccgttgggcaggggtcctgggcccacccgggcaggacgcgtggaccgagtgaccgtggtttctgtgtggtgtcacctgccagacccgccgaagaagccacctctttggagggtgcgctctctggcacgcgccactcccacccatccgtgggccgccagcaccacgcgggccccccatccacatcgcggccaccacgtccctgggacacgccttgtcccccggtgtacgccgagaccaagcacttcctctactcctcaggcgacaaggagcagctgcggccctccttcctactcagctctctgaggcccagcctgactggcgctcggaggctcgtggagaccatctttctgggttccaggccctggatgccagggactccccgcaggttgccccgcctgccccagcgctactggcaaatgcggcccctgtttctggagctgcttgggaaccacgcgcagtgcccctacggggtgctcctcaagacgcactgcccgctgcgagctgcggtcaccccagcagccggtgtctgtgcccgggagaagccccagggctctgtggcggcccccgaggaggaggacacagacccccgtcgcctggtgcagctgctccgccagcacagcagcccctggcaggtgtacggcttcgtgcgggcctgcctgcgccggctggtgcccccaggcctctggggctccaggcacaacgaacgccgcttcctcaggaacaccaagaagttcatctccctggggaagcatgccaagctctcgctgcaggagctgacgtggaagatgagcgtgcggggctgcgcttggctgcgcaggagcccaggggttggctgtgttccggccgcagagcaccgtctgcgtgaggagatcctggccaagttcctgcactggctgatgagtgtgtacgtcgtcgagctgctcaggtctttcttttatgtcacggagaccacgtttcaaaagaacaggctctttttctaccggaagagtgtctggagcaagttgcaaagcattggaatcagacagcacttgaagagggtgcagctgcgggagctgtcggaagcagaggtcaggcagcatcgggaagccaggcccgccctgctgacgtccagactccgcttcatccccaagcctgacgggctgcggccgattgtgaacatggactacgtcgtgggagccagaacgttccgcagagaaaagagggccgagcgtctcacctcgagggtgaaggcactgttcagcgtgctcaactacgagcgggcgcggcgccccggcctcctgggcgcctctgtgctgggcctggacgatatccacagggcctggcgcaccttcgtgctgcgtgtgcgggcccaggacccgccgcctgagctgtactttgtcaaggtggatgtgacgggcgcgtacgacaccatcccccaggacaggctcacggaggtcatcgccagcatcatcaaaccccagaacacgtactgcgtgcgtcggtatgccgtggtccagaaggccgcccatgggcacgtccgcaaggccttcaagagccacgtctctaccttgacagacctccagccgtacatgcgacagttcgtggctcacctgcaggagaccagcccgctgagggatgccgtcgtcatcgagcagagctcctccctgaatgaggccagcagtggcctcttcgacgtcttcctacgcttcatgtgccaccacgccgtgcgcatcaggggcaagtcctacgtccagtgccaggggatcccgcagggctccatcctctccacgctgctctgcagcctgtgctacggcgacatggagaacaagctgtttgcggggattcggcgggacgggctgctcctgcgtttggtggatgatttcttgttggtgacacctcacctcacccacgcgaaaaccttcctcaggaccctggtccgaggtgtccctgagtatggctgcgtggtgaacttgcggaagacagtggtgaacttccctgtagaagacgaggccctgggtggcacggcttttgttcagatgccggcccacggcctattcccctggtgcggcctgctgctggatacccggaccctggaggtgcagagcgactactccagctatgcccggacctccatcagagccagtctcaccttcaaccgcggcttcaaggctgggaggaacatgcgtcgcaaactctttggggtcttgcggctgaagtgtcacagcctgtttctggatttgcaggtgaacagcctccagacggtgtgcaccaacatctacaagatcctcctgctgcaggcgtacaggtttcacgcatgtgtgctgcagctcccatttcatcagcaagtttggaagaaccccacatttttcctgcgcgtcatctctgacacggcctccctctgctactccatcctgaaagccaagaacgcagggatgtcgctgggggccaagggcgccgccggccctctgccctccgaggccgtgcagtggctgtgccaccaagcattcctgctcaagctgactcgacaccgtgtcacctacgtgccactcctggggtcactcaggacagcccagacgcagctgagtcggaagctcccggggacgacgctgactgccctggaggccgcagccaacccggcactgccctcagacttcaagaccatcctggactgatggccacccgcccacagccaggccgagagcagacaccagcagccctgtcacgccgggctctacgtcccagggagggaggggcggcccacacccaggcccgcaccgctgggagtctgaggcctgagtgagtgtttggccgaggcctgcatgtccggctgaaggctgagtgtccggctgaggcctgagcgagtgtccagccaagggctgagtgtccagcacacctgccgtcttcacttccccacaggctggcgctcggctccaccccagggccagcttttcctcaccaggagcccggcttccactccccacataggaatagtccatccccagattcgccattgttcacccctcgccctgccctcctttgccttccacccccaccatccaggtggagaccctgagaaggaccctgggagctctgggaatttggagtgaccaaaggtgtgccctgtacacaggcgaggaccctgcacctggatgggggtccctgtgggtcaaattggggggaggtgctgtgggagtaaaatactgaatatatgagtttttcagttttgaaaaaaaaaaaaaaaaaa

SEQ ID NO: 65 - DNA, 20 bp, synthetic construct
  misc_feature 1..20: note = Description of Artificial Sequence: Synthetic oligonucleotide
  source 1..20: mol_type = other DNA
tgaaggagcccagagagaga

SEQ ID NO: 66 - DNA, 20 bp, synthetic construct
  misc_feature 1..20: note = Description of Artificial Sequence: Synthetic oligonucleotide
  source 1..20: mol_type = other DNA
gtaagccaagaaagaaatcc

SEQ ID NO: 67 - protein, 6 aa, synthetic construct
  REGION 1..6: note = Description of Artificial Sequence: Synthetic peptide
GGSGGS

SEQ ID NO: 68 - protein, 21 aa, synthetic construct
  VARIANT 1..3: note = This region may be absent
  REGION 1..21: note = misc_feature - Variant residues given in the sequence have no preference with respect to those in the annotations for variant positions
  REGION 1..21: note = Description of Artificial Sequence: Synthetic peptide
GSGEGRGSLLTCGDVEENPGP

SEQ ID NO: 69 - protein, 22 aa, synthetic construct
  VARIANT 1..3: note = This region may be absent
  REGION 1..22: note = misc_feature - Variant residues given in the sequence have no preference with respect to those in the annotations for variant positions
  REGION 1..22: note = Description of Artificial Sequence: Synthetic peptide
GSGATNFSLLKQAGDVEENPGP

SEQ ID NO: 70 - protein, 23 aa, synthetic construct
  VARIANT 1..3: note = This region may be absent
  REGION 1..23: note = misc_feature - Variant residues given in the sequence have no preference with respect to those in the annotations for variant positions
  REGION 1..23: note = Description of Artificial Sequence: Synthetic peptide
GSGQCTNYALLKLAGDVESNPGP

SEQ ID NO: 71 - protein, 25 aa, synthetic construct
  VARIANT 1..3: note = This region may be absent
  REGION 1..25: note = misc_feature - Variant residues given in the sequence have no preference with respect to those in the annotations for variant positions
  REGION 1..25: note = Description of Artificial Sequence: Synthetic peptide
GSGVKQTLNFDLLKLAGDVESNPGP

SEQ ID NO: 72 - protein, 30 aa, synthetic construct
  VARIANT 1..30: note = MISC_FEATURE - This sequence may encompass 1-6 Gly Gly Gly Gly Ser repeating units
  REGION 1..30: note = Description of Artificial Sequence: Synthetic polypeptide
GGGGSGGGGSGGGGSGGGGSGGGGSGGGGS

SEQ ID NO: 73 - RNA, 20 nt, synthetic construct
  misc_feature 1..20: note = Description of Artificial Sequence: Synthetic oligonucleotide
  source 1..20: mol_type = other RNA
tgtcgggtctttaaaaatac

SEQ ID NO: 74 - RNA, 20 nt, synthetic construct
  misc_feature 1..20: note = Description of Artificial Sequence: Synthetic oligonucleotide
  source 1..20: mol_type = other RNA
tacaggcccctaaagcacta

SEQ ID NO: 75 - RNA, 20 nt, synthetic construct
  misc_feature 1..20: note = Description of Artificial Sequence: Synthetic oligonucleotide
  source 1..20: mol_type = other RNA
acaggcccctaaagcactaa

SEQ ID NO: 76 - RNA, 20 nt, synthetic construct
  misc_feature 1..20: note = Description of Artificial Sequence: Synthetic oligonucleotide
  source 1..20: mol_type = other RNA
aagcactaagggcatgccct

SEQ ID NO: 77 - RNA, 20 nt, synthetic construct
  misc_feature 1..20: note = Description of Artificial Sequence: Synthetic oligonucleotide
  source 1..20: mol_type = other RNA
gggcatgccctcggtgaaac

SEQ ID NO: 78 - RNA, 20 nt, synthetic construct
  misc_feature 1..20: note = Description of Artificial Sequence: Synthetic oligonucleotide
  source 1..20: mol_type = other RNA
ggcatgccctcggtgaaaca

SEQ ID NO: 79 - RNA, 20 nt, synthetic construct
  misc_feature 1..20: note = Description of Artificial Sequence: Synthetic oligonucleotide
  source 1..20: mol_type = other RNA
gcatgccctcggtgaaacag

SEQ ID NO: 80 - RNA, 20 nt, synthetic construct
  misc_feature 1..20: note = Description of Artificial Sequence: Synthetic oligonucleotide
  source 1..20: mol_type = other RNA
tgagattaaagcgacagaaa

SEQ ID NO: 81 - RNA, 20 nt, synthetic construct
  misc_feature 1..20: note = Description of Artificial Sequence: Synthetic oligonucleotide
  source 1..20: mol_type = other RNA
gagattaaagcgacagaaaa

SEQ ID NO: 82 - RNA, 20 nt, synthetic construct
  misc_feature 1..20: note = Description of Artificial Sequence: Synthetic oligonucleotide
  source 1..20: mol_type = other RNA
taaagcgacagaaaagggaa

SEQ ID NO: 83 - RNA, 20 nt, synthetic construct
  misc_feature 1..20: note = Description of Artificial Sequence: Synthetic oligonucleotide
  source 1..20: mol_type = other RNA
agaaaagggaaaggagagcg

SEQ ID NO: 84 - RNA, 20 nt, synthetic construct
  misc_feature 1..20: note = Description of Artificial Sequence: Synthetic oligonucleotide
  source 1..20: mol_type = other RNA
gaaaagggaaaggagagcgc

SEQ ID NO: 85 - RNA, 20 nt, synthetic construct
  misc_feature 1..20: note = Description of Artificial Sequence: Synthetic oligonucleotide
  source 1..20: mol_type = other RNA
ggaaaggagagcgcgggcaa

SEQ ID NO: 86 - RNA, 20 nt, synthetic construct
  misc_feature 1..20: note = Description of Artificial Sequence: Synthetic oligonucleotide
  source 1..20: mol_type = other RNA
gaaaggagagcgcgggcaac

SEQ ID NO: 87 - RNA, 20 nt, synthetic construct
  misc_feature 1..20: note = Description of Artificial Sequence: Synthetic oligonucleotide
  source 1..20: mol_type = other RNA
gcgcgggcaacgggatctaa

SEQ ID NO: 88 - RNA, 20 nt, synthetic construct
  misc_feature 1..20: note = Description of Artificial Sequence: Synthetic oligonucleotide
  source 1..20: mol_type = other RNA
cgcgggcaacgggatctaaa

SEQ ID NO: 89 - RNA, 20 nt, synthetic construct
  misc_feature 1..20: note = Description of Artificial Sequence: Synthetic oligonucleotide
  source 1..20: mol_type = other RNA
tctaaagggagatagagacg

SEQ ID NO: 90 - RNA, 20 nt, synthetic construct
  misc_feature 1..20: note = Description of Artificial Sequence: Synthetic oligonucleotide
  source 1..20: mol_type = other RNA
ctaaagggagatagagacgc

SEQ ID NO: 91 - RNA, 20 nt, synthetic construct
  misc_feature 1..20: note = Description of Artificial Sequence: Synthetic oligonucleotide
  source 1..20: mol_type = other RNA
gatagagacgcgggcctctg

SEQ ID NO: 92 - RNA, 20 nt, synthetic construct
  misc_feature 1..20: note = Description of Artificial Sequence: Synthetic oligonucleotide
  source 1..20: mol_type = other RNA
atagagacgcgggcctctga

SEQ ID NO: 93 - RNA, 20 nt, synthetic construct
  misc_feature 1..20: note = Description of Artificial Sequence: Synthetic oligonucleotide
  source 1..20: mol_type = other RNA
gacgcgggcctctgagggta

SEQ ID NO: 94 - RNA, 20 nt, synthetic construct
  misc_feature 1..20: note = Description of Artificial Sequence: Synthetic oligonucleotide
  source 1..20: mol_type = other RNA
gcgggcctctgagggtaagg

SEQ ID NO: 95 - RNA, 20 nt, synthetic construct
  misc_feature 1..20: note = Description of Artificial Sequence: Synthetic oligonucleotide
  source 1..20: mol_type = other RNA
cgggcctctgagggtaaggt

SEQ ID NO: 96 - RNA, 20 nt, synthetic construct
  misc_feature 1..20: note = Description of Artificial Sequence: Synthetic oligonucleotide
  source 1..20: mol_type = other RNA
gagggtaaggtgggcgcaag

SEQ ID NO: 97 - RNA, 20 nt, synthetic construct
  misc_feature 1..20: note = Description of Artificial Sequence: Synthetic oligonucleotide
  source 1..20: mol_type = other RNA
gcatgcccttagtgctttag

SEQ ID NO: 98 - RNA, 20 nt, synthetic construct
  misc_feature 1..20: note = Description of Artificial Sequence: Synthetic oligonucleotide
  source 1..20: mol_type = other RNA
ggcatgcccttagtgcttta

SEQ ID NO: 99 - RNA, 20 nt, synthetic construct
  misc_feature 1..20: note = Description of Artificial Sequence: Synthetic oligonucleotide
  source 1..20: mol_type = other RNA
gggcatgcccttagtgcttt

SEQ ID NO: 100 - RNA, 20 nt, synthetic construct
  misc_feature 1..20: note = Description of Artificial Sequence: Synthetic oligonucleotide
  source 1..20: mol_type = other RNA
gcgctcccctgtttcaccga

SEQ ID NO: 101 - RNA, 20 nt, synthetic construct
  misc_feature 1..20: note = Description of Artificial Sequence: Synthetic oligonucleotide
  source 1..20: mol_type = other RNA
agcgctcccctgtttcaccg

SEQ ID NO: 102 - RNA, 20 nt, synthetic construct
  misc_feature 1..20: note = Description of Artificial Sequence: Synthetic oligonucleotide
  source 1..20: mol_type = other RNA
tgcgcccaccttaccctcag

SEQ ID NO: 103 - RNA, 20 nt, synthetic construct
  misc_feature 1..20: note = Description of Artificial Sequence: Synthetic oligonucleotide
  source 1..20: mol_type = other RNA
agagccggcggtagcggcag

SEQ ID NO: 104 - RNA, 20 nt, synthetic construct
  misc_feature 1..20: note = Description of Artificial Sequence: Synthetic oligonucleotide
  source 1..20: mol_type = other RNA
ggcggtagcggcagtggcag

SEQ ID NO: 105 - RNA, 20 nt, synthetic construct
  misc_feature 1..20: note = Description of Artificial Sequence: Synthetic oligonucleotide
  source 1..20: mol_type = other RNA
cagtggcagcggcgagagct

SEQ ID NO: 106 - RNA, 20 nt, synthetic construct
  misc_feature 1..20: note = Description of Artificial Sequence: Synthetic oligonucleotide
  source 1..20: mol_type = other RNA
agtggcagcggcgagagctt

SEQ ID NO: 107 - RNA, 20 nt, synthetic construct
  misc_feature 1..20: note = Description of Artificial Sequence: Synthetic oligonucleotide
  source 1..20: mol_type = other RNA
ggcagcggcgagagcttggg

SEQ ID NO: 108 - RNA, 20 nt, synthetic construct
  misc_feature 1..20: note = Description of Artificial Sequence: Synthetic oligonucleotide
  source 1..20: mol_type = other RNA
cctcgcgagcgccgcgcgcc

SEQ ID NO: 109 - RNA, 20 nt, synthetic construct
  misc_feature 1..20: note = Description of Artificial Sequence: Synthetic oligonucleotide
  source 1..20: mol_type = other RNA
ctcgcgagcgccgcgcgccc

SEQ ID NO: 110 - RNA, 20 nt, synthetic construct
  misc_feature 1..20: note = Description of Artificial Sequence: Synthetic oligonucleotide
  source 1..20: mol_type = other RNA
gcaagtcacgtccgccccct

SEQ ID NO: 111 - RNA, 20 nt, synthetic construct
  misc_feature 1..20: note = Description of Artificial Sequence: Synthetic oligonucleotide
  source 1..20: mol_type = other RNA
tcacgtccgccccctcggcg

SEQ ID NO: 112 - RNA, 20 nt, synthetic construct
  misc_feature 1..20: note = Description of Artificial Sequence: Synthetic oligonucleotide
  source 1..20: mol_type = other RNA
gcgcggccgccccgagacgc

SEQ ID NO: 113 - RNA, 20 nt, synthetic construct
  misc_feature 1..20: note = Description of Artificial Sequence: Synthetic oligonucleotide
  source 1..20: mol_type = other RNA
ctgccttatgaatattgatg

SEQ ID NO: 114 - RNA, 20 nt, synthetic construct
  misc_feature 1..20: note = Description of Artificial Sequence: Synthetic oligonucleotide
  source 1..20: mol_type = other RNA
ccttatgaatattgatgcgg

SEQ ID NO: 115 - RNA, 20 nt, synthetic construct
  misc_feature 1..20: note = Description of Artificial Sequence: Synthetic oligonucleotide
  source 1..20: mol_type = other RNA
tgaatattgatgcggaggct

SEQ ID NO: 116 - RNA, 20 nt, synthetic construct
  misc_feature 1..20: note = Description of Artificial Sequence: Synthetic oligonucleotide
  source 1..20: mol_type = other RNA
tgctttcgtagagaagcaga

SEQ ID NO: 117 - RNA, 20 nt, synthetic construct
  misc_feature 1..20: note = Description of Artificial Sequence: Synthetic oligonucleotide
  source 1..20: mol_type = other RNA
agaagcagaaggaagcaaga

SEQ ID NO: 118 - RNA, 20 nt, synthetic construct
  misc_feature 1..20: note = Description of Artificial Sequence: Synthetic oligonucleotide
  source 1..20: mol_type = other RNA
aagcaagatggctgcccttt

SEQ ID NO: 119 - RNA, 20 nt, synthetic construct
  misc_feature 1..20: note = Description of Artificial Sequence: Synthetic oligonucleotide
  source 1..20: mol_type = other RNA
ccctttaggatttgttagaa

SEQ ID NO: 120 - RNA, 20 nt, synthetic construct
  misc_feature 1..20: note = Description of Artificial Sequence: Synthetic oligonucleotide
  source 1..20: mol_type = other RNA
ggagacccgactgcaactgc

SEQ ID NO: 121 - RNA, 20 nt, synthetic construct
  misc_feature 1..20: note = Description of Artificial Sequence: Synthetic oligonucleotide
  source 1..20: mol_type = other RNA
gcaactgctggattgctgca

SEQ ID NO: 122 - RNA, 20 nt, synthetic construct
  misc_feature 1..20: note = Description of Artificial Sequence: Synthetic oligonucleotide
  source 1..20: mol_type = other RNA
gctggattgctgcaaggctg

SEQ ID NO: 123 - RNA, 20 nt, synthetic construct
  misc_feature 1..20: note = Description of Artificial Sequence: Synthetic oligonucleotide
  source 1..20: mol_type = other RNA
ctggattgctgcaaggctga

SEQ ID NO: 124 - RNA, 20 nt, synthetic construct
  misc_feature 1..20: note = Description of Artificial Sequence: Synthetic oligonucleotide
  source 1..20: mol_type = other RNA
aaggctgagggacgagaacg

SEQ ID NO: 125 - RNA, 20 nt, synthetic construct
  misc_feature 1..20: note = Description of Artificial Sequence: Synthetic oligonucleotide
  source 1..20: mol_type = other RNA
gctgccactgccgctaccgc

SEQ ID NO: 126 - RNA, 20 nt, synthetic construct
  misc_feature 1..20: note = Description of Artificial Sequence: Synthetic oligonucleotide
  source 1..20: mol_type = other RNA
cgctcgcgaggaggcggcgg

SEQ ID NO: 127 - RNA, 20 nt, synthetic construct
  misc_feature 1..20: note = Description of Artificial Sequence: Synthetic oligonucleotide
  source 1..20: mol_type = other RNA
cggcgctcgcgaggaggcgg

SEQ ID NO: 128 - RNA, 20 nt, synthetic construct
  misc_feature 1..20: note = Description of Artificial Sequence: Synthetic oligonucleotide
  source 1..20: mol_type = other RNA
gcgcggcgctcgcgaggagg

SEQ ID NO: 129 - RNA, 20 nt, synthetic construct
  misc_feature 1..20: note = Description of Artificial Sequence: Synthetic oligonucleotide
  source 1..20: mol_type = other RNA
ggcgcgcggcgctcgcgagg

SEQ ID NO: 130 - RNA, 20 nt, synthetic construct
  misc_feature 1..20: note = Description of Artificial Sequence: Synthetic oligonucleotide
  source 1..20: mol_type = other RNA
ccgggcgcgcggcgctcgcg

SEQ ID NO: 131 - RNA, 20 nt, synthetic construct
  misc_feature 1..20: note = Description of Artificial Sequence: Synthetic oligonucleotide
  source 1..20: mol_type = other RNA
gcgagcgggacccgggcgcg

SEQ ID NO: 132 - RNA, 20 nt, synthetic construct
  misc_feature 1..20: note = Description of Artificial Sequence: Synthetic oligonucleotide
  source 1..20: mol_type = other RNA
cttgcatgcgagcgggaccc

SEQ ID NO: 133 - RNA, 20 nt, synthetic construct
  misc_feature 1..20: note = Description of Artificial Sequence: Synthetic oligonucleotide
  source 1..20: mol_type = other RNA
acttgcatgcgagcgggacc

SEQ ID NO: 134 - RNA, 20 nt, synthetic construct
  misc_feature 1..20: note = Description of Artificial Sequence: Synthetic oligonucleotide
  source 1..20: mol_type = other RNA
gacgtgacttgcatgcgagc

SEQ ID NO: 135 - RNA, 20 nt, synthetic construct
  misc_feature 1..20: note = Description of Artificial Sequence: Synthetic oligonucleotide
  source 1..20: mol_type = other RNA
ggacgtgacttgcatgcgag

SEQ ID NO: 136 - RNA, 20 nt, synthetic construct
  misc_feature 1..20: note = Description of Artificial Sequence: Synthetic oligonucleotide
  source 1..20: mol_type = other RNA
gggcggccgcgccgaggggg

SEQ ID NO: 137 - RNA, 20 nt, synthetic construct
  misc_feature 1..20: note = Description of Artificial Sequence: Synthetic oligonucleotide
  source 1..20: mol_type = other RNA
tcggggcggccgcgccgagg

SEQ ID NO: 138 - RNA, 20 nt, synthetic construct
  misc_feature 1..20: note = Description of Artificial Sequence: Synthetic oligonucleotide
  source 1..20: mol_type = other RNA
ctcggggcggccgcgccgag

SEQ ID NO: 139 - RNA, 20 nt, synthetic construct
  misc_feature 1..20: note = Description of Artificial Sequence: Synthetic oligonucleotide
  source 1..20: mol_type = other RNA
tctcggggcggccgcgccga

SEQ ID NO: 140 - RNA, 20 nt, synthetic construct
  misc_feature 1..20: note = Description of Artificial Sequence: Synthetic oligonucleotide
  source 1..20: mol_type = other RNA
gtctcggggcggccgcgccg

SEQ ID NO: 141 - RNA, 20 nt, synthetic construct
  misc_feature 1..20: note = Description of Artificial Sequence: Synthetic oligonucleotide
  source 1..20: mol_type = other RNA
gcggggccggcgtctcgggg

SEQ ID NO: 142 - RNA, 20 nt, synthetic construct
  misc_feature 1..20: note = Description of Artificial Sequence: Synthetic oligonucleotide
  source 1..20: mol_type = other RNA
tcagcggggccggcgtctcg

SEQ ID NO: 143 - RNA, 20 nt, synthetic construct
  misc_feature 1..20: note = Description of Artificial Sequence: Synthetic oligonucleotide
  source 1..20: mol_type = other RNA
ctcagcggggccggcgtctc

SEQ ID NO: 144 - RNA, 20 nt, synthetic construct
  misc_feature 1..20: note = Description of Artificial Sequence: Synthetic oligonucleotide
  source 1..20: mol_type = other RNA
actcagcggggccggcgtct

SEQ ID NO: 145 - RNA, 20 nt, synthetic construct
  misc_feature 1..20: note = Description of Artificial Sequence: Synthetic oligonucleotide
  source 1..20: mol_type = other RNA
ttctcatcactcagcggggc

SEQ ID NO: 146 - RNA, 20 nt, synthetic construct
  misc_feature 1..20: note = Description of Artificial Sequence: Synthetic oligonucleotide
  source 1..20: mol_type = other RNA
tctgttctcatcactcagcg

SEQ ID NO: 147 - RNA, 20 nt, synthetic construct
  misc_feature 1..20: note = Description of Artificial Sequence: Synthetic oligonucleotide
  source 1..20: mol_type = other RNA
gtctgttctcatcactcagc

SEQ ID NO: 148 - RNA, 20 nt, synthetic construct
  misc_feature 1..20: note = Description of Artificial Sequence: Synthetic oligonucleotide
  source 1..20: mol_type = other RNA
cgtctgttctcatcactcag

SEQ ID NO: 149 - RNA, 20 nt, synthetic construct
  misc_feature 1..20: note = Description of Artificial Sequence: Synthetic oligonucleotide
  source 1..20: mol_type = other RNA
cctccgcatcaatattcata

SEQ ID NO: 150 - RNA, 20 nt, synthetic construct
  misc_feature 1..20: note = Description of Artificial Sequence: Synthetic oligonucleotide
  source 1..20: mol_type = other RNA
cctttctaacaaatcctaaa

SEQ ID NO: 151 - RNA, 20 nt, synthetic construct
  misc_feature 1..20: note = Description of Artificial Sequence: Synthetic oligonucleotide
  source 1..20: mol_type = other RNA
tcctttctaacaaatcctaa

SEQ ID NO: 152 - RNA, 20 nt, synthetic construct
  misc_feature 1..20: note = Description of Artificial Sequence: Synthetic oligonucleotide
  source 1..20: mol_type = other RNA
gcaatccagcagttgcagtc

SEQ ID NO: 153 - RNA, 20 nt, synthetic construct
  misc_feature 1..20: note = Description of Artificial Sequence: Synthetic oligonucleotide
  source 1..20: mol_type = other RNA
agcaatccagcagttgcagt

SEQ ID NO: 154 - RNA, 20 nt, synthetic construct
  misc_feature 1..20: note = Description of Artificial Sequence: Synthetic oligonucleotide
  source 1..20: mol_type = other RNA
aaactctgtcttctctaggc

SEQ ID NO: 155 - RNA, 20 nt, synthetic construct
  misc_feature 1..20: note = Description of Artificial Sequence: Synthetic oligonucleotide
  source 1..20: mol_type = other RNA
tcctgttgagttacaacgct

SEQ ID NO: 156 - RNA, 20 nt, synthetic construct
  misc_feature 1..20: note = Description of Artificial Sequence: Synthetic oligonucleotide
  source 1..20: mol_type = other RNA
gagttacaacgcttggaagc

SEQ ID NO: 157 - RNA, 20 nt, synthetic construct
  misc_feature 1..20: note = Description of Artificial Sequence: Synthetic oligonucleotide
  source 1..20: mol_type = other RNA
caacgcttggaagcaggaga

SEQ ID NO: 158 - RNA, 20 nt, synthetic construct
  misc_feature 1..20: note = Description of Artificial Sequence: Synthetic oligonucleotide
  source 1..20: mol_type = other RNA
aacgcttggaagcaggagat

SEQ ID NO: 159 - RNA, 20 nt, synthetic construct
  misc_feature 1..20: note = Description of Artificial Sequence: Synthetic oligonucleotide
  source 1..20: mol_type = other RNA
tgggctcagcagcagccaat

SEQ ID NO: 160 - RNA, 20 nt, synthetic construct
  misc_feature 1..20: note = Description of Artificial Sequence: Synthetic oligonucleotide
  source 1..20: mol_type = other RNA
cagccaataggacatgatcc

SEQ ID NO: 161 - RNA, 20 nt, synthetic construct
  misc_feature 1..20: note = Description of Artificial Sequence: Synthetic oligonucleotide
  source 1..20: mol_type = other RNA
atgatccaggaagagcagta

SEQ ID NO: 162 - RNA, 20 nt, synthetic construct
  misc_feature 1..20: note = Description of Artificial Sequence: Synthetic oligonucleotide
  source 1..20: mol_type = other RNA
tgatccaggaagagcagtaa

SEQ ID NO: 163 - RNA, 20 nt, synthetic construct
  misc_feature 1..20: note = Description of Artificial Sequence: Synthetic oligonucleotide
  source 1..20: mol_type = other RNA
gcagtaagggactgagctgc

SEQ ID NO: 164 - RNA, 20 nt, synthetic construct
  misc_feature 1..20: note = Description of Artificial Sequence: Synthetic oligonucleotide
  source 1..20: mol_type = other RNA
ctgagctgctggtaagacag

SEQ ID NO: 165 - RNA, 20 nt, synthetic construct
  misc_feature 1..20: note = Description of Artificial Sequence: Synthetic oligonucleotide
  source 1..20: mol_type = other RNA
gcaagtaaacaatcttgaga

SEQ ID NO: 166 - RNA, 20 nt, synthetic construct
  misc_feature 1..20: note = Description of Artificial Sequence: Synthetic oligonucleotide
  source 1..20: mol_type = other RNA
ggcaagtaaacaatcttgag

SEQ ID NO: 167 - RNA, 20 nt, synthetic construct
  misc_feature 1..20: note = Description of Artificial Sequence: Synthetic oligonucleotide
  source 1..20: mol_type = other RNA
ttgtaactcaacaggagcaa

SEQ ID NO: 168 - RNA, 20 nt, synthetic construct
  misc_feature 1..20: note = Description of Artificial Sequence: Synthetic oligonucleotide
  source 1..20: mol_type = other RNA
tccaagcgttgtaactcaac

SEQ ID NO: 169 - RNA, 20 nt, synthetic construct
  misc_feature 1..20: note = Description of Artificial Sequence: Synthetic oligonucleotide
  source 1..20: mol_type = other RNA
cttcctggatcatgtcctat

SEQ ID NO: 170 - RNA, 20 nt, synthetic construct
  misc_feature 1..20: note = Description of Artificial Sequence: Synthetic oligonucleotide
  source 1..20: mol_type = other RNA
cagtcccttactgctcttcc

SEQ ID NO: 171 - RNA, 20 nt, synthetic construct
  misc_feature 1..20: note = Description of Artificial Sequence: Synthetic oligonucleotide
  source 1..20: mol_type = other RNA
gctctttagaattcaactag

SEQ ID NO: 172 - RNA, 20 nt, synthetic construct
  misc_feature 1..20: note = Description of Artificial Sequence: Synthetic oligonucleotide
  source 1..20: mol_type = other RNA
ctctttagaattcaactaga

SEQ ID NO: 173 - RNA, 20 nt, synthetic construct
  misc_feature 1..20: note = Description of Artificial Sequence: Synthetic oligonucleotide
  source 1..20: mol_type = other RNA
tcaactagagggcagccttg

SEQ ID NO: 174 - RNA, 20 nt, synthetic construct
  misc_feature 1..20: note = Description of Artificial Sequence: Synthetic oligonucleotide
  source 1..20: mol_type = other RNA
ctagagggcagccttgtgga

SEQ ID NO: 175 - RNA, 20 nt, synthetic construct
  misc_feature 1..20: note = Description of Artificial Sequence: Synthetic oligonucleotide
  source 1..20: mol_type = other RNA
tggccccgaagcaagcctga

SEQ ID NO: 176 - RNA, 20 nt, synthetic construct
  misc_feature 1..20: note = Description of Artificial Sequence: Synthetic oligonucleotide
  source 1..20: mol_type = other RNA
cgaagcaagcctgatggaac

SEQ ID NO: 177 - RNA, 20 nt, synthetic construct
  misc_feature 1..20: note = Description of Artificial Sequence: Synthetic oligonucleotide
  source 1..20: mol_type = other RNA
ggatagaaccaaccatgttg

SEQ ID NO: 178 - RNA, 20 nt, synthetic construct
  misc_feature 1..20: note = Description of Artificial Sequence: Synthetic oligonucleotide
  source 1..20: mol_type = other RNA
gatagaaccaaccatgttga

SEQ ID NO: 179 - RNA, 20 nt, synthetic construct
  misc_feature 1..20: note = Description of Artificial Sequence: Synthetic oligonucleotide
  source 1..20: mol_type = other RNA
catttgccagacagaacctc

SEQ ID NO: 180 - RNA, 20 nt, synthetic construct
  misc_feature 1..20: note = Description of Artificial Sequence: Synthetic oligonucleotide
  source 1..20: mol_type = other RNA
ctggctacaaagctccagaa

SEQ ID NO: 181 - RNA, 20 nt, synthetic construct
  misc_feature 1..20: note = Description of Artificial Sequence: Synthetic oligonucleotide
  source 1..20: mol_type = other RNA
agagctcatccagaagtaaa

SEQ ID NO: 182 - RNA, 20 nt, synthetic construct
  misc_feature 1..20: note = Description of Artificial Sequence: Synthetic oligonucleotide
  source 1..20: mol_type = other RNA
aagtaaatggagacaccaag

SEQ ID NO: 183 - RNA, 20 nt, synthetic construct
  misc_feature 1..20: note = Description of Artificial Sequence: Synthetic oligonucleotide
  source 1..20: mol_type = other RNA
cactctttcaaaagttatta

SEQ ID NO: 184 - RNA, 20 nt, synthetic construct
  misc_feature 1..20: note = Description of Artificial Sequence: Synthetic oligonucleotide
  source 1..20: mol_type = other RNA
ttatggaataccctgtatga

SEQ ID NO: 185 - RNA, 20 nt, synthetic construct
  misc_feature 1..20: note = Description of Artificial Sequence: Synthetic oligonucleotide
  source 1..20: mol_type = other RNA
tatggaataccctgtatgaa

SEQ ID NO: 186 - RNA, 20 nt, synthetic construct
  misc_feature 1..20: note = Description of Artificial Sequence: Synthetic oligonucleotide
  source 1..20: mol_type = other RNA
gactttacacaagaaagtag

SEQ ID NO: 187 - RNA, 20 nt, synthetic construct
  misc_feature 1..20: note = Description of Artificial Sequence: Synthetic oligonucleotide
  source 1..20: mol_type = other RNA
actttacacaagaaagtaga

SEQ ID NO: 188 - RNA, 20 nt, synthetic construct
  misc_feature 1..20: note = Description of Artificial Sequence: Synthetic oligonucleotide
  source 1..20: mol_type = other RNA
tattccaagtgtttgcaaaa

SEQ ID NO: 189 - RNA, 20 nt, synthetic construct
  misc_feature 1..20: note = Description of Artificial Sequence: Synthetic oligonucleotide
  source 1..20: mol_type = other RNA
tccaagtgtttgcaaaatgg

SEQ ID NO: 190 - RNA, 20 nt, synthetic construct
  misc_feature 1..20: note = Description of Artificial Sequence: Synthetic oligonucleotide
  source 1..20: mol_type = other RNA
gttagtgaaccttctctctc

SEQ ID NO: 191 - RNA, 20 nt, synthetic construct
  misc_feature 1..20: note = Description of Artificial Sequence: Synthetic oligonucleotide
  source 1..20: mol_type = other RNA
ttagtgaaccttctctctct

SEQ ID NO: 192 - RNA, 20 nt, synthetic construct
  misc_feature 1..20: note = Description of Artificial Sequence: Synthetic oligonucleotide
  source 1..20: mol_type = other RNA
gaaattgaaacaagaccaaa

SEQ ID NO: 193 - RNA, 20 nt, synthetic construct
  misc_feature 1..20: note = Description of Artificial Sequence: Synthetic oligonucleotide
  source 1..20: mol_type = other RNA
aaacaagaccaaaaggctaa

SEQ ID NO: 194 - RNA, 20 nt, synthetic construct
  misc_feature 1..20: note = Description of Artificial Sequence: Synthetic oligonucleotide
  source 1..20: mol_type = other RNA
aatggagaaagacgtaactt

SEQ ID NO: 195 - RNA, 20 nt, synthetic construct
  misc_feature 1..20: note = Description of Artificial Sequence: Synthetic oligonucleotide
  source 1..20: mol_type = other RNA
atggagaaagacgtaacttc

SEQ ID NO: 196 - RNA, 20 nt, synthetic construct
  misc_feature 1..20: note = Description of Artificial Sequence: Synthetic oligonucleotide
  source 1..20: mol_type = other RNA
tggagaaagacgtaacttcg

SEQ ID NO: 197 - RNA, 20 nt, synthetic construct
  misc_feature 1..20: note = Description of Artificial Sequence: Synthetic oligonucleotide
  source 1..20: mol_type = other RNA
gtaagccaagaaagaaatcc

SEQ ID NO: 198 - RNA, 20 nt, synthetic construct
  misc_feature 1..20: note = Description of Artificial Sequence: Synthetic oligonucleotide
  source 1..20: mol_type = other RNA
ttttcaacacataactgcag

SEQ ID NO: 199 - RNA, 20 nt, synthetic construct
  misc_feature 1..20: note = Description of Artificial Sequence: Synthetic oligonucleotide
  source 1..20: mol_type = other RNA
tttcaacacataactgcagt

SEQ ID NO: 200 - RNA, 20 nt, synthetic construct
  misc_feature 1..20: note = Description of Artificial Sequence: Synthetic oligonucleotide
  source 1..20: mol_type = other RNA
gcttcagattctgaatgagc

SEQ ID NO: 201 - RNA, 20 nt, synthetic construct
  misc_feature 1..20: note = Description of Artificial Sequence: Synthetic oligonucleotide
  source 1..20: mol_type = other RNA
tcagattctgaatgagcagg

SEQ ID NO: 202 - RNA, 20 nt, synthetic construct
  misc_feature 1..20: note = Description of Artificial Sequence: Synthetic oligonucleotide
  source 1..20: mol_type = other RNA
cagattctgaatgagcagga

SEQ ID NO: 203 - RNA, 20 nt, synthetic construct
  misc_feature 1..20: note = Description of Artificial Sequence: Synthetic oligonucleotide
  source 1..20: mol_type = other RNA
agattctgaatgagcaggag

SEQ ID NO: 204 - RNA, 20 nt, synthetic construct
  misc_feature 1..20: note = Description of Artificial Sequence: Synthetic oligonucleotide
  source 1..20: mol_type = other RNA
cattgtattacttaaaaaca

SEQ ID NO: 205 - RNA, 20 nt, synthetic construct
  misc_feature 1..20: note = Description of Artificial Sequence: Synthetic oligonucleotide
  source 1..20: mol_type = other RNA
aaggcagtgctaatgcctaa

SEQ ID NO: 206 - RNA, 20 nt, synthetic construct
  misc_feature 1..20: note = Description of Artificial Sequence: Synthetic oligonucleotide
  source 1..20: mol_type = other RNA
tacagtttctgcctcttccg

SEQ ID NO: 207 - RNA, 20 nt, synthetic construct
  misc_feature 1..20: note = Description of Artificial Sequence: Synthetic oligonucleotide
  source 1..20: mol_type = other RNA
tcttccgtggaacacacaca

SEQ ID NO: 208 - RNA, 20 nt, synthetic construct
  misc_feature 1..20: note = Description of Artificial Sequence: Synthetic oligonucleotide
  source 1..20: mol_type = other RNA
acacacacatggtgaactcc

SEQ ID NO: 209 - RNA, 20 nt, synthetic construct
  misc_feature 1..20: note = Description of Artificial Sequence: Synthetic oligonucleotide
  source 1..20: mol_type = other RNA
tccagattgtgtttccattg

SEQ ID NO: 210 - RNA, 20 nt, synthetic construct
  misc_feature 1..20: note = Description of Artificial Sequence: Synthetic oligonucleotide
  source 1..20: mol_type = other RNA
cataaatgccattaacagtc

SEQ ID NO: 211 - RNA, 20 nt, synthetic construct
  misc_feature 1..20: note = Description of Artificial Sequence: Synthetic oligonucleotide
  source 1..20: mol_type = other RNA
actcacccatcgcatacctc

SEQ ID NO: 212 - RNA, 20 nt, synthetic construct
  misc_feature 1..20: note = Description of Artificial Sequence: Synthetic oligonucleotide
  source 1..20: mol_type = other RNA
ctcacccatcgcatacctca

SEQ ID NO: 213 - RNA, 20 nt, synthetic construct
  misc_feature 1..20: note = Description of Artificial Sequence: Synthetic oligonucleotide
  source 1..20: mol_type = other RNA
gcctccaaagccagctgcag

SEQ ID NO: 214 - RNA, 20 nt, synthetic construct
  misc_feature 1..20: note = Description of Artificial Sequence: Synthetic oligonucleotide
  source 1..20: mol_type = other RNA
gccagctgcagtggtgagtg

SEQ ID NO: 215 - RNA, 20 nt, synthetic construct
  misc_feature 1..20: note = Description of Artificial Sequence: Synthetic oligonucleotide
  source 1..20: mol_type = other RNA
tcctgcagaaaataacatcc

SEQ ID NO: 216 - RNA, 20 nt, synthetic construct
  misc_feature 1..20: note = Description of Artificial Sequence: Synthetic oligonucleotide
  source 1..20: mol_type = other RNA
cctgcagaaaataacatcca

SEQ ID NO: 217 - RNA, 20 nt, synthetic construct
  misc_feature 1..20: note = Description of Artificial Sequence: Synthetic oligonucleotide
  source 1..20: mol_type = other RNA
ggaaccacaaagctagcgtc

SEQ ID NO: 218 - RNA, 20 nt, synthetic construct
  misc_feature 1..20: note = Description of Artificial Sequence: Synthetic oligonucleotide
  source 1..20: mol_type = other RNA
tctggtgaagaattctgttc

SEQ ID NO: 219 - RNA, 20 nt, synthetic construct
  misc_feature 1..20: note = Description of Artificial Sequence: Synthetic oligonucleotide
  source 1..20: mol_type = other RNA
agcagcaatttgcaagctcc

SEQ ID NO: 220 - RNA, 20 nt, synthetic construct
  misc_feature 1..20: note = Description of Artificial Sequence: Synthetic oligonucleotide
  source 1..20: mol_type = other RNA
agcaatttgcaagctcctgg

SEQ ID NO: 221 - RNA, 20 nt, synthetic construct
  misc_feature 1..20: note = Description of Artificial Sequence: Synthetic oligonucleotide
  source 1..20: mol_type = other RNA
ctcctggtggcagctctgaa

SEQ ID NO: 222 - RNA, 20 nt, synthetic construct
  misc_feature 1..20: note = Description of Artificial Sequence: Synthetic oligonucleotide
  source 1..20: mol_type = other RNA
ttaaaacaaaatgaaatgaa

SEQ ID NO: 223 - RNA, 20 nt, synthetic construct
  misc_feature 1..20: note = Description of Artificial Sequence: Synthetic oligonucleotide
  source 1..20: mol_type = other RNA
gcaaagctcagtgttcacta

SEQ ID NO: 224 - RNA, 20 nt, synthetic construct
  misc_feature 1..20: note = Description of Artificial Sequence: Synthetic oligonucleotide
  source 1..20: mol_type = other RNA
tccccctcctcctcttccac

SEQ ID NO: 225 - RNA, 20 nt, synthetic construct
  misc_feature 1..20: note = Description of Artificial Sequence: Synthetic oligonucleotide
  source 1..20: mol_type = other RNA
gttcctcagcttccttcaga

SEQ ID NO: 226 - RNA, 20 nt, synthetic construct
  misc_feature 1..20: note = Description of Artificial Sequence: Synthetic oligonucleotide
  source 1..20: mol_type = other RNA
gaaggaaaaagcactctgaa

SEQ ID NO: 227 - RNA, 20 nt, synthetic construct
  misc_feature 1..20: note = Description of Artificial Sequence: Synthetic oligonucleotide
  source 1..20: mol_type = other RNA
ggaaaaagcactctgaatgg

SEQ ID NO: 228 - RNA, 20 nt, synthetic construct
  misc_feature 1..20: note = Description of Artificial Sequence: Synthetic oligonucleotide
  source 1..20: mol_type = other RNA
aaagtaacacaacactttta

SEQ ID NO: 229 - RNA, 20 nt, synthetic construct
  misc_feature 1..20: note = Description of Artificial Sequence: Synthetic oligonucleotide
  source 1..20: mol_type = other RNA
aagtaacacaacacttttaa

SEQ ID NO: 230 - RNA, 20 nt, synthetic construct
  misc_feature 1..20: note = Description of Artificial Sequence: Synthetic oligonucleotide
  source 1..20: mol_type = other RNA
tttaagggaagtgaaaatag

SEQ ID NO: 231 - RNA, 20 nt, synthetic construct
  misc_feature 1..20: note = Description of Artificial Sequence: Synthetic oligonucleotide
  source 1..20: mol_type = other RNA
ttaagggaagtgaaaataga

SEQ ID NO: 232 - RNA, 20 nt, synthetic construct
  misc_feature 1..20: note = Description of Artificial Sequence: Synthetic oligonucleotide
  source 1..20: mol_type = other RNA
gaaaatagagggtaaacctg

SEQ ID NO: 233 - RNA, 20 nt, synthetic construct
  misc_feature 1..20: note = Description of Artificial Sequence: Synthetic oligonucleotide
  source 1..20: mol_type = other RNA
cttctccgatgctttctgaa

SEQ ID NO: 234 - RNA, 20 nt, synthetic construct
  misc_feature 1..20: note = Description of Artificial Sequence: Synthetic oligonucleotide
  source 1..20: mol_type = other RNA
ctcagaataattgtgtgaac

SEQ ID NO: 235 - RNA, 20 nt, synthetic construct
  misc_feature 1..20: note = Description of Artificial Sequence: Synthetic oligonucleotide
  source 1..20: mol_type = other RNA
aggaatgacatacagactgc

SEQ ID NO: 236 - RNA, 20 nt, synthetic construct
  misc_feature 1..20: note = Description of Artificial Sequence: Synthetic oligonucleotide
  source 1..20: mol_type = other RNA
ggaatgacatacagactgca

SEQ ID NO: 237 - RNA, 20 nt, synthetic construct
  misc_feature 1..20: note = Description of Artificial Sequence: Synthetic oligonucleotide
  source 1..20: mol_type = other RNA
aagcataacccaccaatttt

SEQ ID NO: 238 - RNA, 20 nt, synthetic construct
  misc_feature 1..20: note = Description of Artificial Sequence: Synthetic oligonucleotide
  source 1..20: mol_type = other RNA
ccaccaatttttggtagcag

SEQ ID NO: 239 - RNA, 20 nt, synthetic construct
  misc_feature 1..20: note = Description of Artificial Sequence: Synthetic oligonucleotide
  source 1..20: mol_type = other RNA
tggtagcagtggagagctac

SEQ ID NO: 240 - RNA, 20 nt, synthetic construct
  misc_feature 1..20: note = Description of Artificial Sequence: Synthetic oligonucleotide
  source 1..20: mol_type = other RNA
caaagagcaagagattctga

SEQ ID NO: 241 - RNA, 20 nt, synthetic construct
  misc_feature 1..20: note = Description of Artificial Sequence: Synthetic oligonucleotide
  source 1..20: mol_type = other RNA
aaagagcaagagattctgaa

SEQ ID NO: 242 - RNA, 20 nt, synthetic construct
  misc_feature 1..20: note = Description of Artificial Sequence: Synthetic oligonucleotide
  source 1..20: mol_type = other RNA
gattctgaagggtcgagaca

SEQ ID NO: 243 - RNA, 20 nt, synthetic construct
  misc_feature 1..20: note = Description of Artificial Sequence: Synthetic oligonucleotide
  source 1..20: mol_type = other RNA
acacagcactatctgaaacc

SEQ ID NO: 244 - RNA, 20 nt, synthetic construct
  misc_feature 1..20: note = Description of Artificial Sequence: Synthetic oligonucleotide
  source 1..20: mol_type = other RNA
agcactatctgaaaccagga

SEQ ID NO: 245 - RNA, 20 nt, synthetic construct
  misc_feature 1..20: note = Description of Artificial Sequence: Synthetic oligonucleotide
  source 1..20: mol_type = other RNA
accaggatggattgaattga

SEQ ID NO: 246 - RNA, 20 nt, synthetic construct
  misc_feature 1..20: note = Description of Artificial Sequence: Synthetic oligonucleotide
  source 1..20: mol_type = other RNA
ggcccctcgttttcaccaag

SEQ ID NO: 247 - RNA, 20 nt, synthetic construct
  misc_feature 1..20: note = Description of Artificial Sequence: Synthetic oligonucleotide
  source 1..20: mol_type = other RNA
atcccatctaaaacgtaatg

SEQ ID NO: 248 - RNA, 20 nt, synthetic construct
  misc_feature 1..20: note = Description of Artificial Sequence: Synthetic oligonucleotide
  source 1..20: mol_type = other RNA
atgacctccaaacaatacac

SEQ ID NO: 249 - RNA, 20 nt, synthetic construct
  misc_feature 1..20: note = Description of Artificial Sequence: Synthetic oligonucleotide
  source 1..20: mol_type = other RNA
actggaaattccaacatgcc

SEQ ID NO: 250 - RNA, 20 nt, synthetic construct
  misc_feature 1..20: note = Description of Artificial Sequence: Synthetic oligonucleotide
  source 1..20: mol_type = other RNA
ctggaaattccaacatgcct

SEQ ID NO: 251 - RNA, 20 nt, synthetic construct
  misc_feature 1..20: note = Description of Artificial Sequence: Synthetic oligonucleotide
  source 1..20: mol_type = other RNA
tggaaattccaacatgcctg

SEQ ID NO: 252 - RNA, 20 nt, synthetic construct
  misc_feature 1..20: note = Description of Artificial Sequence: Synthetic oligonucleotide
  source 1..20: mol_type = other RNA
ggaaattccaacatgcctgg

SEQ ID NO: 253 - RNA, 20 nt, synthetic construct
  misc_feature 1..20: note = Description of Artificial Sequence: Synthetic oligonucleotide
  source 1..20: mol_type = other RNA
gaaattccaacatgcctggg

SEQ ID NO: 254 - RNA, 20 nt, synthetic construct
  misc_feature 1..20: note = Description of Artificial Sequence: Synthetic oligonucleotide
  source 1..20: mol_type = other RNA
acatgcctggggggctccca

SEQ ID NO: 255 - RNA, 20 nt, synthetic construct
  misc_feature 1..20: note = Description of Artificial Sequence: Synthetic oligonucleotide
  source 1..20: mol_type = other RNA
cacccagaaaacaacacagc

SEQ ID NO: 256 - RNA, 20 nt, synthetic construct
  misc_feature 1..20: note = Description of Artificial Sequence: Synthetic oligonucleotide
  source 1..20: mol_type = other RNA
taccaagttgaaatgaatca

SEQ ID NO: 257 - RNA, 20 nt, synthetic construct
  misc_feature 1..20: note = Description of Artificial Sequence: Synthetic oligonucleotide
  source 1..20: mol_type = other RNA
accaagttgaaatgaatcaa

SEQ ID NO: 258 - RNA, 20 nt, synthetic construct
  misc_feature 1..20: note = Description of Artificial Sequence: Synthetic oligonucleotide
  source 1..20: mol_type = other RNA
atgaatcaagggcagtccca

SEQ ID NO: 259 - RNA, 20 nt, synthetic construct
  misc_feature 1..20: note = Description of Artificial Sequence: Synthetic oligonucleotide
  source 1..20: mol_type = other RNA
agggcagtcccaaggtacag

SEQ ID NO: 260 - RNA, 20 nt, synthetic construct
  misc_feature 1..20: note = Description of Artificial Sequence: Synthetic oligonucleotide
  source 1..20: mol_type = other RNA
gttccaaaaaccctcacacc

SEQ ID NO: 261 - RNA, 20 nt, synthetic construct
  misc_feature 1..20: note = Description of Artificial Sequence: Synthetic oligonucleotide
  source 1..20: mol_type = other RNA
gctcatgtgcagtcactgtg

SEQ ID NO: 262 - RNA, 20 nt, synthetic construct
  misc_feature 1..20: note = Description of Artificial Sequence: Synthetic oligonucleotide
  source 1..20: mol_type = other RNA
gaaacagcacttgaatcaac

SEQ ID NO: 263 - RNA, 20 nt, synthetic construct
  misc_feature 1..20: note = Description of Artificial Sequence: Synthetic oligonucleotide
  source 1..20: mol_type = other RNA
gcaacataagcctcataaac

SEQ ID NO: 264 - RNA, 20 nt, synthetic construct
  misc_feature 1..20: note = Description of Artificial Sequence: Synthetic oligonucleotide
  source 1..20: mol_type = other RNA
attacaaataaagaataaag

SEQ ID NO: 265 - RNA, 20 nt, synthetic construct
  misc_feature 1..20: note = Description of Artificial Sequence: Synthetic oligonucleotide
  source 1..20: mol_type = other RNA
aacaatgatcagcaaagaga

SEQ ID NO: 266 - RNA, 20 nt, synthetic construct
  misc_feature 1..20: note = Description of Artificial Sequence: Synthetic oligonucleotide
  source 1..20: mol_type = other RNA
caaagagaaggatcattctt

SEQ ID NO: 267 - RNA, 20 nt, synthetic construct
  misc_feature 1..20: note = Description of Artificial Sequence: Synthetic oligonucleotide
  source 1..20: mol_type = other RNA
attctttggccagactaaag

SEQ ID NO: 268 - RNA, 20 nt, synthetic construct
  misc_feature 1..20: note = Description of Artificial Sequence: Synthetic oligonucleotide
  source 1..20: mol_type = other RNA
aaagtggaagaatgttttca

SEQ ID NO: 269 - RNA, 20 nt, synthetic construct
  misc_feature 1..20: note = Description of Artificial Sequence: Synthetic oligonucleotide
  source 1..20: mol_type = other RNA
cgagactcataatgtccaaa

SEQ ID NO: 270 - RNA, 20 nt, synthetic construct
  misc_feature 1..20: note = Description of Artificial Sequence: Synthetic oligonucleotide
  source 1..20: mol_type = other RNA
gagactcataatgtccaaat

SEQ ID NO: 271 - RNA, 20 nt, synthetic construct
  misc_feature 1..20: note = Description of Artificial Sequence: Synthetic oligonucleotide
  source 1..20: mol_type = other RNA
tcataatgtccaaatgggac

SEQ ID NO: 272 - RNA, 20 nt, synthetic construct
  misc_feature 1..20: note = Description of Artificial Sequence: Synthetic oligonucleotide
  source 1..20: mol_type = other RNA
taatgtccaaatgggactgg

SEQ ID NO: 273 - RNA, 20 nt, synthetic construct
  misc_feature 1..20: note = Description of Artificial Sequence: Synthetic oligonucleotide
  source 1..20: mol_type = other RNA
atcaagtgcatgcaaaatac

SEQ ID NO: 274 - RNA, 20 nt, synthetic construct
  misc_feature 1..20: note = Description of Artificial Sequence: Synthetic oligonucleotide
  source 1..20: mol_type = other RNA
acacatcctgaactttttgc

SEQ ID NO: 275 - RNA, 20 nt, synthetic construct
  misc_feature 1..20: note = Description of Artificial Sequence: Synthetic oligonucleotide
  source 1..20: mol_type = other RNA
caaagcaagatcttcttcac

SEQ ID NO: 276 - RNA, 20 nt, synthetic construct
  misc_feature 1..20: note = Description of Artificial Sequence: Synthetic oligonucleotide
  source 1..20: mol_type = other RNA
tcacaggtgctttcaagaac

SEQ ID NO: 277 - RNA, 20 nt, synthetic construct
  misc_feature 1..20: note = Description of Artificial Sequence: Synthetic oligonucleotide
  source 1..20: mol_type = other RNA
acaacaagcttcagttctac

SEQ ID NO: 278 - RNA, 20 nt, synthetic construct
  misc_feature 1..20: note = Description of Artificial Sequence: Synthetic oligonucleotide
  source 1..20: mol_type = other RNA
caacaagcttcagttctaca

SEQ ID NO: 279 - RNA, 20 nt, synthetic construct
  misc_feature 1..20: note = Description of Artificial Sequence: Synthetic oligonucleotide
  source 1..20: mol_type = other RNA
aatagaaaccaagatatgtc

SEQ ID NO: 280 - RNA, 20 nt, synthetic construct
  misc_feature 1..20: note = Description of Artificial Sequence: Synthetic oligonucleotide
  source 1..20: mol_type = other RNA
ctgcgcaacttgctcagcaa

SEQ ID NO: 281 - RNA, 20 nt, synthetic construct
  misc_feature 1..20: note = Description of Artificial Sequence: Synthetic oligonucleotide
  source 1..20: mol_type = other RNA
tgtttttcctgtgcctgacc

SEQ ID NO: 282 - RNA, 20 nt, synthetic construct
  misc_feature 1..20: note = Description of Artificial Sequence: Synthetic oligonucleotide
  source 1..20: mol_type = other RNA
gtttttcctgtgcctgacca

SEQ ID NO: 283 - RNA, 20 nt, synthetic construct
  misc_feature 1..20: note = Description of Artificial Sequence: Synthetic oligonucleotide
  source 1..20: mol_type = other RNA
tttcctgtgcctgaccaggg

SEQ ID NO: 284 - RNA, 20 nt, synthetic construct
  misc_feature 1..20: note = Description of Artificial Sequence: Synthetic oligonucleotide
  source 1..20: mol_type = other RNA
cactcagacccctccccaga

SEQ ID NO: 285 - RNA, 20 nt, synthetic construct
  misc_feature 1..20: note = Description of Artificial Sequence: Synthetic oligonucleotide
  source 1..20: mol_type = other RNA
ctcaaaagcatgctgctcta

SEQ ID NO: 286 - RNA, 20 nt, synthetic construct
  misc_feature 1..20: note = Description of Artificial Sequence: Synthetic oligonucleotide
  source 1..20: mol_type = other RNA
aaaagcatgctgctctaagg

SEQ ID NO: 287 - RNA, 20 nt, synthetic construct
  misc_feature 1..20: note = Description of Artificial Sequence: Synthetic oligonucleotide
  source 1..20: mol_type = other RNA
cttgccatagtcagatgcac

SEQ ID NO: 288 - RNA, 20 nt, synthetic construct
  misc_feature 1..20: note = Description of Artificial Sequence: Synthetic oligonucleotide
  source 1..20: mol_type = other RNA
tcagatgcacaggccaatta

SEQ ID NO: 289 - RNA, 20 nt, synthetic construct
  misc_feature 1..20: note = Description of Artificial Sequence: Synthetic oligonucleotide
  source 1..20: mol_type = other RNA
gatgcacaggccaattaagg

SEQ ID NO: 290 - RNA, 20 nt, synthetic construct
  misc_feature 1..20: note = Description of Artificial Sequence: Synthetic oligonucleotide
  source 1..20: mol_type = other RNA
aggccaattaaggtggaacc

SEQ ID NO: 291 - RNA, 20 nt, synthetic construct
  misc_feature 1..20: note = Description of Artificial Sequence: Synthetic oligonucleotide
  source 1..20: mol_type = other RNA
caccaccagaaaacaaaaca

SEQ ID NO: 292 - RNA, 20 nt, synthetic construct
  misc_feature 1..20: note = Description of Artificial Sequence: Synthetic oligonucleotide
  source 1..20: mol_type = other RNA
agaaaacaaaacatggaaaa

SEQ ID NO: 293 - RNA, 20 nt, synthetic construct
  misc_feature 1..20: note = Description of Artificial Sequence: Synthetic oligonucleotide
  source 1..20: mol_type = other RNA
aaagagcatcattgagacca

SEQ ID NO: 294 - RNA, 20 nt, synthetic construct
  misc_feature 1..20: note = Description of Artificial Sequence: Synthetic oligonucleotide
  source 1..20: mol_type = other RNA
caagtcgttatttgaccata

SEQ ID NO: 295 - RNA, 20 nt, synthetic construct
  misc_feature 1..20: note = Description of Artificial Sequence: Synthetic oligonucleotide
  source 1..20: mol_type = other RNA
caagtaaaagttgaaatgtc

SEQ ID NO: 296 - RNA, 20 nt, synthetic construct
  misc_feature 1..20: note = Description of Artificial Sequence: Synthetic oligonucleotide
  source 1..20: mol_type = other RNA
aagtaaaagttgaaatgtca

SEQ ID NO: 297 - RNA, 20 nt, synthetic construct
  misc_feature 1..20: note = Description of Artificial Sequence: Synthetic oligonucleotide
  source 1..20: mol_type = other RNA
tactcctataaaaaatttat

SEQ ID NO: 298 - RNA, 20 nt, synthetic construct
  misc_feature 1..20: note = Description of Artificial Sequence: Synthetic oligonucleotide
  source 1..20: mol_type = other RNA
ttcccatcttgcagatgtgt

SEQ ID NO: 299 - RNA, 20 nt, synthetic construct
  misc_feature 1..20: note = Description of Artificial Sequence: Synthetic oligonucleotide
  source 1..20: mol_type = other RNA
cagaaatgtactgagacaca

SEQ ID NO: 300 - RNA, 20 nt, synthetic construct
  misc_feature 1..20: note = Description of Artificial Sequence: Synthetic oligonucleotide
  source 1..20: mol_type = other RNA
agcaaatttatcttcagata

SEQ ID NO: 301 - RNA, 20 nt, synthetic construct
  misc_feature 1..20: note = Description of Artificial Sequence: Synthetic oligonucleotide
  source 1..20: mol_type = other RNA
gcaaatttatcttcagatat

SEQ ID NO: 302 - RNA, 20 nt, synthetic construct
  misc_feature 1..20: note = Description of Artificial Sequence: Synthetic oligonucleotide
  source 1..20: mol_type = other RNA
ctttttttaaatcttgagtc

SEQ ID NO: 303 - RNA, 20 nt, synthetic construct
  misc_feature 1..20: note = Description of Artificial Sequence: Synthetic oligonucleotide
  source 1..20: mol_type = other RNA
agtctggcagcaatttgtaa

SEQ ID NO: 304 - RNA, 20 nt, synthetic construct
  misc_feature 1..20: note = Description of Artificial Sequence: Synthetic oligonucleotide
  source 1..20: mol_type = other RNA
gctctttgtatattatctcc

SEQ ID NO: 305 - RNA, 20 nt, synthetic construct
  misc_feature 1..20: note = Description of Artificial Sequence: Synthetic oligonucleotide
  source 1..20: mol_type = other RNA
tatctcctggagagacagct

SEQ ID NO: 306 - RNA, 20 nt, synthetic construct
  misc_feature 1..20: note = Description of Artificial Sequence: Synthetic oligonucleotide
  source 1..20: mol_type = other RNA
aatgagaaaataacgaccat

SEQ ID NO: 307 - RNA, 20 nt, synthetic construct
  misc_feature 1..20: note = Description of Artificial Sequence: Synthetic oligonucleotide
  source 1..20: mol_type = other RNA
tttaaatattttttaattca

SEQ ID NO: 308 - RNA, 20 nt, synthetic construct
  misc_feature 1..20: note = Description of Artificial Sequence: Synthetic oligonucleotide
  source 1..20: mol_type = other RNA
tattagtttcacaagatttc

SEQ ID NO: 309 - RNA, 20 nt, synthetic construct
  misc_feature 1..20: note = Description of Artificial Sequence: Synthetic oligonucleotide
  source 1..20: mol_type = other RNA
tcacaagatttctggctaat

SEQ ID NO: 310 - RNA, 20 nt, synthetic construct
  misc_feature 1..20: note = Description of Artificial Sequence: Synthetic oligonucleotide
  source 1..20: mol_type = other RNA
cacaagatttctggctaata

SEQ ID NO: 311 - RNA, 20 nt, synthetic construct
  misc_feature 1..20: note = Description of Artificial Sequence: Synthetic oligonucleotide
  source 1..20: mol_type = other RNA
tatcttcagtcttcatgagt

SEQ ID NO: 312 - RNA, 20 nt, synthetic construct
  misc_feature 1..20: note = Description of Artificial Sequence: Synthetic oligonucleotide
  source 1..20: mol_type = other RNA
atcttcagtcttcatgagtt

SEQ ID NO: 313 - RNA, 20 nt, synthetic construct
  misc_feature 1..20: note = Description of Artificial Sequence: Synthetic oligonucleotide
  source 1..20: mol_type = other RNA
tcttcagtcttcatgagttg

SEQ ID NO: 314 - RNA, 20 nt, synthetic construct
  misc_feature 1..20: note = Description of Artificial Sequence: Synthetic oligonucleotide
  source 1..20: mol_type = other RNA
cttcagtcttcatgagttgg

SEQ ID NO: 315 - RNA, 20 nt, synthetic construct
  misc_feature 1..20: note = Description of Artificial Sequence: Synthetic oligonucleotide
  source 1..20: mol_type = other RNA
cttttctccatttatacatt

SEQ ID NO: 316 - RNA, 20 nt, synthetic construct
  misc_feature 1..20: note = Description of Artificial Sequence: Synthetic oligonucleotide
  source 1..20: mol_type = other RNA
aaagctttttgttaaaattc

SEQ ID NO: 317 - RNA, 20 nt, synthetic construct
  misc_feature 1..20: note = Description of Artificial Sequence: Synthetic oligonucleotide
  source 1..20: mol_type = other RNA
taaaattcaggatatgtaat

SEQ ID NO: 318 - RNA, 20 nt, synthetic construct
  misc_feature 1..20: note = Description of Artificial Sequence: Synthetic oligonucleotide
  source 1..20: mol_type = other RNA
aggatatgtaataggtctgt

SEQ ID NO: 319 - RNA, 20 nt, synthetic construct
  misc_feature 1..20: note = Description of Artificial Sequence: Synthetic oligonucleotide
  source 1..20: mol_type = other RNA
tagtgaaatatttttgctga

SEQ ID NO: 320 - RNA, 20 nt, synthetic construct
  misc_feature 1..20: note = Description of Artificial Sequence: Synthetic oligonucleotide
  source 1..20: mol_type = other RNA
gatggatgtagatatatacg

SEQ ID NO: 321 - RNA, 20 nt, synthetic construct
  misc_feature 1..20: note = Description of Artificial Sequence: Synthetic oligonucleotide
  source 1..20: mol_type = other RNA
agacaaatgttaaattagtg

SEQ ID NO: 322 - RNA, 20 nt, synthetic construct
  misc_feature 1..20: note = Description of Artificial Sequence: Synthetic oligonucleotide
  source 1..20: mol_type = other RNA
gataccccacactgtgtaga

SEQ ID NO: 323 - RNA, 20 nt, synthetic construct
  misc_feature 1..20: note = Description of Artificial Sequence: Synthetic oligonucleotide
  source 1..20: mol_type = other RNA
ccccacactgtgtagaagga

SEQ ID NO: 324 - RNA, 20 nt, synthetic construct
  misc_feature 1..20: note = Description of Artificial Sequence: Synthetic oligonucleotide
  source 1..20: mol_type = other RNA
cacactgtgtagaaggatgg

SEQ ID NO: 325 - RNA, 20 nt, synthetic construct
  misc_feature 1..20: note = Description of Artificial Sequence: Synthetic oligonucleotide
  source 1..20: mol_type = other RNA
acactgtgtagaaggatgga

SEQ ID NO: 326 - RNA, 20 nt, synthetic construct
  misc_feature 1..20: note = Description of Artificial Sequence: Synthetic oligonucleotide
  source 1..20: mol_type = other RNA
ctgtgtagaaggatggaggg

SEQ ID NO: 327 - RNA, 20 nt, synthetic construct
  misc_feature 1..20: note = Description of Artificial Sequence: Synthetic oligonucleotide
  source 1..20: mol_type = other RNA
ctactgtccctctttgcgtg

SEQ ID NO: 328 - RNA, 20 nt, synthetic construct
  misc_feature 1..20: note = Description of Artificial Sequence: Synthetic oligonucleotide
  source 1..20: mol_type = other RNA
tggttattaagttgcctcac

SEQ ID NO: 329 - RNA, 20 nt, synthetic construct
  misc_feature 1..20: note = Description of Artificial Sequence: Synthetic oligonucleotide
  source 1..20: mol_type = other RNA
ggttattaagttgcctcact

SEQ ID NO: 330 - RNA, 20 nt, synthetic construct
  misc_feature 1..20: note = Description of Artificial Sequence: Synthetic oligonucleotide
  source 1..20: mol_type = other RNA
cacatctcatagataatatt

SEQ ID NO: 331 - RNA, 20 nt, synthetic construct
  misc_feature 1..20: note = Description of Artificial Sequence: Synthetic oligonucleotide
  source 1..20: mol_type = other RNA
tcccacttttccatctttgt

SEQ ID NO: 332 - RNA, 20 nt, synthetic construct
  misc_feature 1..20: note = Description of Artificial Sequence: Synthetic oligonucleotide
  source 1..20: mol_type = other RNA
ttctttttgcctgactctcc

SEQ ID NO: 333 - RNA, 20 nt, synthetic construct
  misc_feature 1..20: note = Description of Artificial Sequence: Synthetic oligonucleotide
  source 1..20: mol_type = other RNA
ttctaaagtacatactaata

SEQ ID NO: 334 - RNA, 20 nt, synthetic construct
  misc_feature 1..20: note = Description of Artificial Sequence: Synthetic oligonucleotide
  source 1..20: mol_type = other RNA
tctaaagtacatactaatat

SEQ ID NO: 335 - RNA, 20 nt, synthetic construct
  misc_feature 1..20: note = Description of Artificial Sequence: Synthetic oligonucleotide
  source 1..20: mol_type = other RNA
agtacatactaatatgggtc

SEQ ID NO: 336 - RNA, 20 nt, synthetic construct
  misc_feature 1..20: note = Description of Artificial Sequence: Synthetic oligonucleotide
  source 1..20: mol_type = other RNA
aaacagcaattaaatgttat

SEQ ID NO: 337 - RNA, 20 nt, synthetic construct
  misc_feature 1..20: note = Description of Artificial Sequence: Synthetic oligonucleotide
  source 1..20: mol_type = other RNA
aacagcaattaaatgttata

SEQ ID NO: 338 - RNA, 20 nt, synthetic construct
  misc_feature 1..20: note = Description of Artificial Sequence: Synthetic oligonucleotide
  source 1..20: mol_type = other RNA
attaaatgttatagggaagt

SEQ ID NO: 339 - RNA, 20 nt, synthetic construct
  misc_feature 1..20: note = Description of Artificial Sequence: Synthetic oligonucleotide
  source 1..20: mol_type = other RNA
atagggaagtaggaagaaaa

SEQ ID NO: 340 - RNA, 20 nt, synthetic construct
  misc_feature 1..20: note = Description of Artificial Sequence: Synthetic oligonucleotide
  source 1..20: mol_type = other RNA
tagggaagtaggaagaaaaa

SEQ ID NO: 341 - RNA, 20 nt, synthetic construct
  misc_feature 1..20: note = Description of Artificial Sequence: Synthetic oligonucleotide
  source 1..20: mol_type = other RNA
agggaagtaggaagaaaaag

SEQ ID NO: 342 - RNA, 20 nt, synthetic construct
  misc_feature 1..20: note = Description of Artificial Sequence: Synthetic oligonucleotide
  source 1..20: mol_type = other RNA
caataaaccaagcaatattc

SEQ ID NO: 343 - RNA, 20 nt, synthetic construct
  misc_feature 1..20: note = Description of Artificial Sequence: Synthetic oligonucleotide
  source 1..20: mol_type = other RNA
aataaaccaagcaatattct

SEQ ID NO: 344 - RNA, 20 nt, synthetic construct
  misc_feature 1..20: note = Description of Artificial Sequence: Synthetic oligonucleotide
  source 1..20: mol_type = other RNA
ataaaccaagcaatattctg

SEQ ID NO: 345 - RNA, 20 nt, synthetic construct
  misc_feature 1..20: note = Description of Artificial Sequence: Synthetic oligonucleotide
  source 1..20: mol_type = other RNA
taaaccaagcaatattctgg

SEQ ID NO: 346 - RNA, 20 nt, synthetic construct
  misc_feature 1..20: note = Description of Artificial Sequence: Synthetic oligonucleotide
  source 1..20: mol_type = other RNA
accaagcaatattctggggg

SEQ ID NO: 347 - RNA, 20 nt, synthetic construct
  misc_feature 1..20: note = Description of Artificial Sequence: Synthetic oligonucleotide
  source 1..20: mol_type = other RNA
ccaagcaatattctgggggt

SEQ ID NO: 348 - RNA, 20 nt, synthetic construct
  misc_feature 1..20: note = Description of Artificial Sequence: Synthetic oligonucleotide
  source 1..20: mol_type = other RNA
ttctgggggtgggatagagc

SEQ ID NO: 349 - RNA, 20 nt, synthetic construct
  misc_feature 1..20: note = Description of Artificial Sequence: Synthetic oligonucleotide
  source 1..20: mol_type = other RNA
tcttttaaaatccaagtaat

SEQ ID NO: 350 - RNA, 20 nt, synthetic construct
  misc_feature 1..20: note = Description of Artificial Sequence: Synthetic oligonucleotide
  source 1..20: mol_type = other RNA
ttaaaatccaagtaataggt

SEQ ID NO: 351 - RNA, 20 nt, synthetic construct
  misc_feature 1..20: note = Description of Artificial Sequence: Synthetic oligonucleotide
  source 1..20: mol_type = other RNA
ttttttccagctcaaaaaat

SEQ ID NO: 352 - RNA, 20 nt, synthetic construct
  misc_feature 1..20: note = Description of Artificial Sequence: Synthetic oligonucleotide
  source 1..20: mol_type = other RNA
tttgtttagtttcatttatt

SEQ ID NO: 353 - RNA, 20 nt, synthetic construct
  misc_feature 1..20: note = Description of Artificial Sequence: Synthetic oligonucleotide
  source 1..20: mol_type = other RNA
tgtacatatacttaattatg

SEQ ID NO: 354 - RNA, 20 nt, synthetic construct
  misc_feature 1..20: note = Description of Artificial Sequence: Synthetic oligonucleotide
  source 1..20: mol_type = other RNA
tagagcccttaatgtgtagt

SEQ ID NO: 355 - RNA, 20 nt, synthetic construct
  misc_feature 1..20: note = Description of Artificial Sequence: Synthetic oligonucleotide
  source 1..20: mol_type = other RNA
agagcccttaatgtgtagtt

SEQ ID NO: 356 - RNA, 20 nt, synthetic construct
  misc_feature 1..20: note = Description of Artificial Sequence: Synthetic oligonucleotide
  source 1..20: mol_type = other RNA
gagcccttaatgtgtagttg

SEQ ID NO: 357 - RNA, 20 nt, synthetic construct
  misc_feature 1..20: note = Description of Artificial Sequence: Synthetic oligonucleotide
  source 1..20: mol_type = other RNA
agcccttaatgtgtagttgg

SEQ ID NO: 358 - RNA, 20 nt, synthetic construct
  misc_feature 1..20: note = Description of Artificial Sequence: Synthetic oligonucleotide
  source 1..20: mol_type = other RNA
tagttgggggttaagctttg

SEQ ID NO: 359 - RNA, 20 nt, synthetic construct
  misc_feature 1..20: note = Description of Artificial Sequence: Synthetic oligonucleotide
  source 1..20: mol_type = other RNA
ctttatatttagtataattg

SEQ ID NO: 360 - RNA, 20 nt, synthetic construct
  misc_feature 1..20: note = Description of Artificial Sequence: Synthetic oligonucleotide
  source 1..20: mol_type = other RNA
caaattattgaaaaagatga

SEQ ID NO: 361 - RNA, 20 nt, synthetic construct
  misc_feature 1..20: note = Description of Artificial Sequence: Synthetic oligonucleotide
  source 1..20: mol_type = other RNA
ggtcctttttatacccatct

SEQ ID NO: 362 - RNA, 20 nt, synthetic construct
  misc_feature 1..20: note = Description of Artificial Sequence: Synthetic oligonucleotide
  source 1..20: mol_type = other RNA
ttttatacccatctaggagc

SEQ ID NO: 363 - RNA, 20 nt, synthetic construct
  misc_feature 1..20: note = Description of Artificial Sequence: Synthetic oligonucleotide
  source 1..20: mol_type = other RNA
tctaggagcaggtcctaatg

SEQ ID NO: 364 - RNA, 20 nt, synthetic construct
  misc_feature 1..20: note = Description of Artificial Sequence: Synthetic oligonucleotide
  source 1..20: mol_type = other RNA
ggcagctattagagaaatca

SEQ ID NO: 365 - RNA, 20 nt, synthetic construct
  misc_feature 1..20: note = Description of Artificial Sequence: Synthetic oligonucleotide
  source 1..20: mol_type = other RNA
ttagagaaatcatggaagaa

SEQ ID NO: 366 - RNA, 20 nt, synthetic construct
  misc_feature 1..20: note = Description of Artificial Sequence: Synthetic oligonucleotide
  source 1..20: mol_type = other RNA
aagaaaggtaattaacgcaa

SEQ ID NO: 367 - RNA, 20 nt, synthetic construct
  misc_feature 1..20: note = Description of Artificial Sequence: Synthetic oligonucleotide
  source 1..20: mol_type = other RNA
ggtaattaacgcaaaggcac

SEQ ID NO: 368 - RNA, 20 nt, synthetic construct
  misc_feature 1..20: note = Description of Artificial Sequence: Synthetic oligonucleotide
  source 1..20: mol_type = other RNA
gtaattaacgcaaaggcaca

SEQ ID NO: 369 - RNA, 20 nt, synthetic construct
  misc_feature 1..20: note = Description of Artificial Sequence: Synthetic oligonucleotide
  source 1..20: mol_type = other RNA
taaattgagtaattattagt

SEQ ID NO: 370 - RNA, 20 nt, synthetic construct
  misc_feature 1..20: note = Description of Artificial Sequence: Synthetic oligonucleotide
  source 1..20: mol_type = other RNA
ttagtaggcttagctattct

SEQ ID NO: 371 - RNA, 20 nt, synthetic construct
  misc_feature 1..20: note = Description of Artificial Sequence: Synthetic oligonucleotide
  source 1..20: mol_type = other RNA
tagtaggcttagctattcta

SEQ ID NO: 372 - RNA, 20 nt, synthetic construct
  misc_feature 1..20: note = Description of Artificial Sequence: Synthetic oligonucleotide
  source 1..20: mol_type = other RNA
agagagtcacaatatttgac

SEQ ID NO: 373 - RNA, 20 nt, synthetic construct
  misc_feature 1..20: note = Description of Artificial Sequence: Synthetic oligonucleotide
  source 1..20: mol_type = other RNA
aggactaatagtctgctagc

SEQ ID NO: 374 - RNA, 20 nt, synthetic construct
  misc_feature 1..20: note = Description of Artificial Sequence: Synthetic oligonucleotide
  source 1..20: mol_type = other RNA
aatagtctgctagctggcac

SEQ ID NO: 375 - RNA, 20 nt, synthetic construct
  misc_feature 1..20: note = Description of Artificial Sequence: Synthetic oligonucleotide
  source 1..20: mol_type = other RNA
acaggctgcccactttgcga

SEQ ID NO: 376 - RNA, 20 nt, synthetic construct
  misc_feature 1..20: note = Description of Artificial Sequence: Synthetic oligonucleotide
  source 1..20: mol_type = other RNA
cgatggatgccagaaaaccc

SEQ ID NO: 377 - RNA, 20 nt, synthetic construct
  misc_feature 1..20: note = Description of Artificial Sequence: Synthetic oligonucleotide
  source 1..20: mol_type = other RNA
cagaaaacccaggcatgaac

SEQ ID NO: 378 - RNA, 20 nt, synthetic construct
  misc_feature 1..20: note = Description of Artificial Sequence: Synthetic oligonucleotide
  source 1..20: mol_type = other RNA
acccaggcatgaacaggaat

SEQ ID NO: 379 - RNA, 20 nt, synthetic construct
  misc_feature 1..20: note = Description of Artificial Sequence: Synthetic oligonucleotide
  source 1..20: mol_type = other RNA
tgaacaggaatcggccagcc

SEQ ID NO: 380 - RNA, 20 nt, synthetic construct
  misc_feature 1..20: note = Description of Artificial Sequence: Synthetic oligonucleotide
  source 1..20: mol_type = other RNA
cagccaggctgccagccaca

SEQ ID NO: 381 - RNA, 20 nt, synthetic construct
  misc_feature 1..20: note = Description of Artificial Sequence: Synthetic oligonucleotide
  source 1..20: mol_type = other RNA
ggctgccagccacaaggtac

SEQ ID NO: 382 - RNA, 20 nt, synthetic construct
  misc_feature 1..20: note = Description of Artificial Sequence: Synthetic oligonucleotide
  source 1..20: mol_type = other RNA
cagccacaaggtactggcac

SEQ ID NO: 383 - RNA, 20 nt, synthetic construct
  misc_feature 1..20: note = Description of Artificial Sequence: Synthetic oligonucleotide
  source 1..20: mol_type = other RNA
ctggcacaggctccaacgag

SEQ ID NO: 384 - RNA, 20 nt, synthetic construct
  misc_feature 1..20: note = Description of Artificial Sequence: Synthetic oligonucleotide
  source 1..20: mol_type = other RNA
tccaacgagaggtcccactc

SEQ ID NO: 385 - RNA, 20 nt, synthetic construct
  misc_feature 1..20: note = Description of Artificial Sequence: Synthetic oligonucleotide
  source 1..20: mol_type = other RNA
aagtgtcaaagcagaaagac

SEQ ID NO: 386 - RNA, 20 nt, synthetic construct
  misc_feature 1..20: note = Description of Artificial Sequence: Synthetic oligonucleotide
  source 1..20: mol_type = other RNA
gcagaaagactggtaaagtg

SEQ ID NO: 387 - RNA, 20 nt, synthetic construct
  misc_feature 1..20: note = Description of Artificial Sequence: Synthetic oligonucleotide
  source 1..20: mol_type = other RNA
tttttttcgctatcaatcac

SEQ ID NO: 388 - RNA, 20 nt, synthetic construct
  misc_feature 1..20: note = Description of Artificial Sequence: Synthetic oligonucleotide
  source 1..20: mol_type = other RNA
tgagcgagataatgcagaga

SEQ ID NO: 389 - RNA, 20 nt, synthetic construct
  misc_feature 1..20: note = Description of Artificial Sequence: Synthetic oligonucleotide
  source 1..20: mol_type = other RNA
ctctgagctgttcttcttct

SEQ ID NO: 390 - RNA, 20 nt, synthetic construct
  misc_feature 1..20: note = Description of Artificial Sequence: Synthetic oligonucleotide
  source 1..20: mol_type = other RNA
tctgagctgttcttcttcta

SEQ ID NO: 391 - RNA, 20 nt, synthetic construct
  misc_feature 1..20: note = Description of Artificial Sequence: Synthetic oligonucleotide
  source 1..20: mol_type = other RNA
tagggtgccttttcattaag

SEQ ID NO: 392 - RNA, 20 nt, synthetic construct
  misc_feature 1..20: note = Description of Artificial Sequence: Synthetic oligonucleotide
  source 1..20: mol_type = other RNA
gtgccttttcattaagaggt

SEQ ID NO: 393 - RNA, 20 nt, synthetic construct
  misc_feature 1..20: note = Description of Artificial Sequence: Synthetic oligonucleotide
  source 1..20: mol_type = other RNA
gtattattattaaagtactt

SEQ ID NO: 394 - RNA, 20 nt, synthetic construct
  misc_feature 1..20: note = Description of Artificial Sequence: Synthetic oligonucleotide
  source 1..20: mol_type = other RNA
ttaaagtacttaggatacat

SEQ ID NO: 395 - RNA, 20 nt, synthetic construct
  misc_feature 1..20: note = Description of Artificial Sequence: Synthetic oligonucleotide
  source 1..20: mol_type = other RNA
taaagtacttaggatacatt

SEQ ID NO: 396 - RNA, 20 nt, synthetic construct
  misc_feature 1..20: note = Description of Artificial Sequence: Synthetic oligonucleotide
  source 1..20: mol_type = other RNA
aaagtacttaggatacattg

SEQ ID NO: 397 - RNA, 20 nt, synthetic construct
  misc_feature 1..20: note = Description of Artificial Sequence: Synthetic oligonucleotide
  source 1..20: mol_type = other RNA
taggatacattggggcagct

SEQ ID NO: 398 - RNA, 20 nt, synthetic construct
  misc_feature 1..20: note = Description of Artificial Sequence: Synthetic oligonucleotide
  source 1..20: mol_type = other RNA
ttcactaaataatcatctag

SEQ ID NO: 399 - RNA, 20 nt, synthetic construct
  misc_feature 1..20: note = Description of Artificial Sequence: Synthetic oligonucleotide
  source 1..20: mol_type = other RNA
taaataatcatctagtggcc

SEQ ID NO: 400 - RNA, 20 nt, synthetic construct
  misc_feature 1..20: note = Description of Artificial Sequence: Synthetic oligonucleotide
  source 1..20: mol_type = other RNA
ttgttttttaaacaagcagt

SEQ ID NO: 401 - RNA, 20 nt, synthetic construct
  misc_feature 1..20: note = Description of Artificial Sequence: Synthetic oligonucleotide
  source 1..20: mol_type = other RNA
ttttttaaacaagcagtagg

SEQ ID NO: 402 - RNA, 20 nt, synthetic construct
  misc_feature 1..20: note = Description of Artificial Sequence: Synthetic oligonucleotide
  source 1..20: mol_type = other RNA
acaagcagtaggtggtgctt

SEQ ID NO: 403 - RNA, 20 nt, synthetic construct
  misc_feature 1..20: note = Description of Artificial Sequence: Synthetic oligonucleotide
  source 1..20: mol_type = other RNA
taggtggtgctttggtcata

SEQ ID NO: 404 - RNA, 20 nt, synthetic construct
  misc_feature 1..20: note = Description of Artificial Sequence: Synthetic oligonucleotide
  source 1..20: mol_type = other RNA
aggtggtgctttggtcataa

SEQ ID NO: 405 - RNA, 20 nt, synthetic construct
  misc_feature 1..20: note = Description of Artificial Sequence: Synthetic oligonucleotide
  source 1..20: mol_type = other RNA
ggaagatatagtctatttct

SEQ ID NO: 406 - RNA, 20 nt, synthetic construct
  misc_feature 1..20: note = Description of Artificial Sequence: Synthetic oligonucleotide
  source 1..20: mol_type = other RNA
actattccatattttccatg

SEQ ID NO: 407 - RNA, 20 nt, synthetic construct
  misc_feature 1..20: note = Description of Artificial Sequence: Synthetic oligonucleotide
  source 1..20: mol_type = other RNA
ttccatattttccatgtggc

SEQ ID NO: 408 - RNA, 20 nt, synthetic construct
  misc_feature 1..20: note = Description of Artificial Sequence: Synthetic oligonucleotide
  source 1..20: mol_type = other RNA
tctaaattgtgagacattct

SEQ ID NO: 409 - RNA, 20 nt, synthetic construct
  misc_feature 1..20: note = Description of Artificial Sequence: Synthetic oligonucleotide
  source 1..20: mol_type = other RNA
aaattgtgagacattcttgg

SEQ ID NO: 410 - RNA, 20 nt, synthetic construct
  misc_feature 1..20: note = Description of Artificial Sequence: Synthetic oligonucleotide
  source 1..20: mol_type = other RNA
taaaatagctaaatttagta

SEQ ID NO: 411 - RNA, 20 nt, synthetic construct
  misc_feature 1..20: note = Description of Artificial Sequence: Synthetic oligonucleotide
  source 1..20: mol_type = other RNA
aaaatagctaaatttagtaa

SEQ ID NO: 412 - RNA, 20 nt, synthetic construct
  misc_feature 1..20: note = Description of Artificial Sequence: Synthetic oligonucleotide
  source 1..20: mol_type = other RNA
atctgtacattttgatattg

SEQ ID NO: 413 - RNA, 20 nt, synthetic construct
  misc_feature 1..20: note = Description of Artificial Sequence: Synthetic oligonucleotide
  source 1..20: mol_type = other RNA
tttgatattgaggaaaaaca

SEQ ID NO: 414 - RNA, 20 nt, synthetic construct
  misc_feature 1..20: note = Description of Artificial Sequence: Synthetic oligonucleotide
  source 1..20: mol_type = other RNA
aaaccattatccagtttgct

SEQ ID NO: 415 - RNA, 20 nt, synthetic construct
  misc_feature 1..20: note = Description of Artificial Sequence: Synthetic oligonucleotide
  source 1..20: mol_type = other RNA
taataaaccgttcatttctc

SEQ ID NO: 416 - RNA, 20 nt, synthetic construct
  misc_feature 1..20: note = Description of Artificial Sequence: Synthetic oligonucleotide
  source 1..20: mol_type = other RNA
accgttcatttctcaggatg

SEQ ID NO: 417 - RNA, 20 nt, synthetic construct
  misc_feature 1..20: note = Description of Artificial Sequence: Synthetic oligonucleotide
  source 1..20: mol_type = other RNA
tagttgaattctaaagagca

SEQ ID NO: 418 - RNA, 20 nt, synthetic construct
  misc_feature 1..20: note = Description of Artificial Sequence: Synthetic oligonucleotide
  source 1..20: mol_type = other RNA
ttgcttcggggccatccaca

SEQ ID NO: 419 - RNA, 20 nt, synthetic construct
  misc_feature 1..20: note = Description of Artificial Sequence: Synthetic oligonucleotide
  source 1..20: mol_type = other RNA
gttccatcaggcttgcttcg

SEQ ID NO: 420 - RNA, 20 nt, synthetic construct
  misc_feature 1..20: note = Description of Artificial Sequence: Synthetic oligonucleotide
  source 1..20: mol_type = other RNA
tgttccatcaggcttgcttc

SEQ ID NO: 421 - RNA, 20 nt, synthetic construct
  misc_feature 1..20: note = Description of Artificial Sequence: Synthetic oligonucleotide
  source 1..20: mol_type = other RNA
ctgttccatcaggcttgctt

SEQ ID NO: 422 - RNA, 20 nt, synthetic construct
  misc_feature 1..20: note = Description of Artificial Sequence: Synthetic oligonucleotide
  source 1..20: mol_type = other RNA
tggttctatcctgttccatc

SEQ ID NO: 423 - RNA, 20 nt, synthetic construct
  misc_feature 1..20: note = Description of Artificial Sequence: Synthetic oligonucleotide
  source 1..20: mol_type = other RNA
tctgttgccctcaacatggt

SEQ ID NO: 424 - RNA, 20 nt, synthetic construct
  misc_feature 1..20: note = Description of Artificial Sequence: Synthetic oligonucleotide
  source 1..20: mol_type = other RNA
ttagtctgttgccctcaaca

SEQ ID NO: 425 - RNA, 20 nt, synthetic construct
  misc_feature 1..20: note = Description of Artificial Sequence: Synthetic oligonucleotide
  source 1..20: mol_type = other RNA
ggaggtgatggtatcaggaa

SEQ ID NO: 426 - RNA, 20 nt, synthetic construct
  misc_feature 1..20: note = Description of Artificial Sequence: Synthetic oligonucleotide
  source 1..20: mol_type = other RNA
aaatgggaggtgatggtatc

SEQ ID NO: 427 - RNA, 20 nt, synthetic construct
  misc_feature 1..20: note = Description of Artificial Sequence: Synthetic oligonucleotide
  source 1..20: mol_type = other RNA
gtctggcaaatgggaggtga

SEQ ID NO: 428 - RNA, 20 nt, synthetic construct
  misc_feature 1..20: note = Description of Artificial Sequence: Synthetic oligonucleotide
  source 1..20: mol_type = other RNA
ggttctgtctggcaaatggg

SEQ ID NO: 429 - RNA, 20 nt, synthetic construct
  misc_feature 1..20: note = Description of Artificial Sequence: Synthetic oligonucleotide
  source 1..20: mol_type = other RNA
agaggttctgtctggcaaat

SEQ ID NO: 430 - RNA, 20 nt, synthetic construct
  misc_feature 1..20: note = Description of Artificial Sequence: Synthetic oligonucleotide
  source 1..20: mol_type = other RNA
cagaggttctgtctggcaaa

SEQ ID NO: 431 - RNA, 20 nt, synthetic construct
  misc_feature 1..20: note = Description of Artificial Sequence: Synthetic oligonucleotide
  source 1..20: mol_type = other RNA
ttgtagccagaggttctgtc

SEQ ID NO: 432 - RNA, 20 nt, synthetic construct
  misc_feature 1..20: note = Description of Artificial Sequence: Synthetic oligonucleotide
  source 1..20: mol_type = other RNA
ttctggagctttgtagccag

SEQ ID NO: 433 - RNA, 20 nt, synthetic construct
  misc_feature 1..20: note = Description of Artificial Sequence: Synthetic oligonucleotide
  source 1..20: mol_type = other RNA
caggcagtgggcttccattc

SEQ ID NO: 434 - RNA, 20 nt, synthetic construct
  misc_feature 1..20: note = Description of Artificial Sequence: Synthetic oligonucleotide
  source 1..20: mol_type = other RNA
gatgagctctctcaggcagt

SEQ ID NO: 435 - RNA, 20 nt, synthetic construct
  misc_feature 1..20: note = Description of Artificial Sequence: Synthetic oligonucleotide
  source 1..20: mol_type = other RNA
ggatgagctctctcaggcag

SEQ ID NO: 436 - RNA, 20 nt, synthetic construct
  misc_feature 1..20: note = Description of Artificial Sequence: Synthetic oligonucleotide
  source 1..20: mol_type = other RNA
acttctggatgagctctctc

SEQ ID NO: 437 - RNA, 20 nt, synthetic construct
  misc_feature 1..20: note = Description of Artificial Sequence: Synthetic oligonucleotide
  source 1..20: mol_type = other RNA
ttggtgtctccatttacttc

SEQ ID NO: 438 - RNA, 20 nt, synthetic construct
  misc_feature 1..20: note = Description of Artificial Sequence: Synthetic oligonucleotide
  source 1..20: mol_type = other RNA
acttttgaaagagtgccact

SEQ ID NO: 439 - RNA, 20 nt, synthetic construct
  misc_feature 1..20: note = Description of Artificial Sequence: Synthetic oligonucleotide
  source 1..20: mol_type = other RNA
ttctggcttcccttcataca

SEQ ID NO: 440 - RNA, 20 nt, synthetic construct
  misc_feature 1..20: note = Description of Artificial Sequence: Synthetic oligonucleotide
  source 1..20: mol_type = other RNA
attctggcttcccttcatac

SEQ ID NO: 441 - RNA, 20 nt, synthetic construct
  misc_feature 1..20: note = Description of Artificial Sequence: Synthetic oligonucleotide
  source 1..20: mol_type = other RNA
caggactcacacgactattc

SEQ ID NO: 442 - RNA, 20 nt, synthetic construct
  misc_feature 1..20: note = Description of Artificial Sequence: Synthetic oligonucleotide
  source 1..20: mol_type = other RNA
ctactttcttgtgtaaagtc

SEQ ID NO: 443 - RNA, 20 nt, synthetic construct
  misc_feature 1..20: note = Description of Artificial Sequence: Synthetic oligonucleotide
  source 1..20: mol_type = other RNA
tcctccattttgcaaacact

SEQ ID NO: 444 - RNA, 20 nt, synthetic construct
  misc_feature 1..20: note = Description of Artificial Sequence: Synthetic oligonucleotide
  source 1..20: mol_type = other RNA
tgaaggagcccagagagaga

SEQ ID NO: 445 - RNA, 20 nt, synthetic construct
  misc_feature 1..20: note = Description of Artificial Sequence: Synthetic oligonucleotide
  source 1..20: mol_type = other RNA
gtttcaatttcttgatctga

SEQ ID NO: 446 - RNA, 20 nt, synthetic construct
  misc_feature 1..20: note = Description of Artificial Sequence: Synthetic oligonucleotide
  source 1..20: mol_type = other RNA
gtctttctccattagccttt

SEQ ID NO: 447 - RNA, 20 nt, synthetic construct
  misc_feature 1..20: note = Description of Artificial Sequence: Synthetic oligonucleotide
  source 1..20: mol_type = other RNA
tttcacctggatttctttct

SEQ ID NO: 448 - RNA, 20 nt, synthetic construct
  misc_feature 1..20: note = Description of Artificial Sequence: Synthetic oligonucleotide
  source 1..20: mol_type = other RNA
tttggttgactgctttcacc

SEQ ID NO: 449 - RNA, 20 nt, synthetic construct
  misc_feature 1..20: note = Description of Artificial Sequence: Synthetic oligonucleotide
  source 1..20: mol_type = other RNA
tcactcaaatcggagacatt

SEQ ID NO: 450 - RNA, 20 nt, synthetic construct
  misc_feature 1..20: note = Description of Artificial Sequence: Synthetic oligonucleotide
  source 1..20: mol_type = other RNA
ttctttcttatcactcaaat

SEQ ID NO: 451 - RNA, 20 nt, synthetic construct
  misc_feature 1..20: note = Description of Artificial Sequence: Synthetic oligonucleotide
  source 1..20: mol_type = other RNA
atctttaactgcattttctt

SEQ ID NO: 452 - RNA, 20 nt, synthetic construct
  misc_feature 1..20: note = Description of Artificial Sequence: Synthetic oligonucleotide
  source 1..20: mol_type = other RNA
aatctttaactgcattttct

SEQ ID NO: 453 - RNA, 20 nt, synthetic construct
  misc_feature 1..20: note = Description of Artificial Sequence: Synthetic oligonucleotide
  source 1..20: mol_type = other RNA
gcagttatgtgttgaaaaac

SEQ ID NO: 454 - RNA, 20 nt, synthetic construct
  misc_feature 1..20: note = Description of Artificial Sequence: Synthetic oligonucleotide
  source 1..20: mol_type = other RNA
atctgaagctctggattttc

SEQ ID NO: 455 - RNA, 20 nt, synthetic construct
  misc_feature 1..20: note = Description of Artificial Sequence: Synthetic oligonucleotide
  source 1..20: mol_type = other RNA
tcattcagaatctgaagctc

SEQ ID NO: 456 - RNA, 20 nt, synthetic construct
  misc_feature 1..20: note = Description of Artificial Sequence: Synthetic oligonucleotide
  source 1..20: mol_type = other RNA
gtaatacaatgttcttgtca

SEQ ID NO: 457 - RNA, 20 nt, synthetic construct
  misc_feature 1..20: note = Description of Artificial Sequence: Synthetic oligonucleotide
  source 1..20: mol_type = other RNA
gcagaaactgtagcaccatt

SEQ ID NO: 458 - RNA, 20 nt, synthetic construct
  misc_feature 1..20: note = Description of Artificial Sequence: Synthetic oligonucleotide
  source 1..20: mol_type = other RNA
atgtgtgtgttccacggaag

SEQ ID NO: 459 - RNA, 20 nt, synthetic construct
  misc_feature 1..20: note = Description of Artificial Sequence: Synthetic oligonucleotide
  source 1..20: mol_type = other RNA
ttcaccatgtgtgtgttcca

SEQ ID NO: 460 - RNA, 20 nt, synthetic construct
  misc_feature 1..20: note = Description of Artificial Sequence: Synthetic oligonucleotide
  source 1..20: mol_type = other RNA
attgagacagtgttttttcc

SEQ ID NO: 461 - RNA, 20 nt, synthetic construct
  misc_feature 1..20: note = Description of Artificial Sequence: Synthetic oligonucleotide
  source 1..20: mol_type = other RNA
accgcaatggaaacacaatc

SEQ ID NO: 462 - RNA, 20 nt, synthetic construct
  misc_feature 1..20: note = Description of Artificial Sequence: Synthetic oligonucleotide
  source 1..20: mol_type = other RNA
tgtggttttctgcaccgcaa

SEQ ID NO: 463 - RNA, 20 nt, synthetic construct
  misc_feature 1..20: note = Description of Artificial Sequence: Synthetic oligonucleotide
  source 1..20: mol_type = other RNA
aatggcatttatgtgagatg

SEQ ID NO: 464 - RNA, 20 nt, synthetic construct
  misc_feature 1..20: note = Description of Artificial Sequence: Synthetic oligonucleotide
  source 1..20: mol_type = other RNA
attagtagcctgactgttaa

SEQ ID NO: 465 - RNA, 20 nt, synthetic construct
  misc_feature 1..20: note = Description of Artificial Sequence: Synthetic oligonucleotide
  source 1..20: mol_type = other RNA
cgatgggtgagtgatctcac

SEQ ID NO: 466 - RNA, 20 nt, synthetic construct
  misc_feature 1..20: note = Description of Artificial Sequence: Synthetic oligonucleotide
  source 1..20: mol_type = other RNA
tctgccctgaggtatgcgat

SEQ ID NO: 467 - RNA, 20 nt, synthetic construct
  misc_feature 1..20: note = Description of Artificial Sequence: Synthetic oligonucleotide
  source 1..20: mol_type = other RNA
atctgccctgaggtatgcga

SEQ ID NO: 468 - RNA, 20 nt, synthetic construct
  misc_feature 1..20: note = Description of Artificial Sequence: Synthetic oligonucleotide
  source 1..20: mol_type = other RNA
tgcggaattgatctgccctg

SEQ ID NO: 469 - RNA, 20 nt, synthetic construct
  misc_feature 1..20: note = Description of Artificial Sequence: Synthetic oligonucleotide
  source 1..20: mol_type = other RNA
ctcagagttagaggtctgtg

SEQ ID NO: 470 - RNA, 20 nt, synthetic construct
  misc_feature 1..20: note = Description of Artificial Sequence: Synthetic oligonucleotide
  source 1..20: mol_type = other RNA
tggaggcagctcagagttag

SEQ ID NO: 471 - RNA, 20 nt, synthetic construct
  misc_feature 1..20: note = Description of Artificial Sequence: Synthetic oligonucleotide
  source 1..20: mol_type = other RNA
accactgcagctggctttgg

SEQ ID NO: 472 - RNA, 20 nt, synthetic construct
  misc_feature 1..20: note = Description of Artificial Sequence: Synthetic oligonucleotide
  source 1..20: mol_type = other RNA
ctcaccactgcagctggctt

SEQ ID NO: 473 - RNA, 20 nt, synthetic construct
  misc_feature 1..20: note = Description of Artificial Sequence: Synthetic oligonucleotide
  source 1..20: mol_type = other RNA
gcctcactcaccactgcagc

SEQ ID NO: 474 - RNA, 20 nt, synthetic construct
  misc_feature 1..20: note = Description of Artificial Sequence: Synthetic oligonucleotide
  source 1..20: mol_type = other RNA
atcagcatcatcagcatcac

SEQ ID NO: 475 - RNA, 20 nt, synthetic construct
  misc_feature 1..20: note = Description of Artificial Sequence: Synthetic oligonucleotide
  source 1..20: mol_type = other RNA
tagcattgcagctagtttac

SEQ ID NO: 476 - RNA, 20 nt, synthetic construct
  misc_feature 1..20: note = Description of Artificial Sequence: Synthetic oligonucleotide
  source 1..20: mol_type = other RNA
ttctggtttctgaaaggaac

SEQ ID NO: 477 - RNA, 20 nt, synthetic construct
  misc_feature 1..20: note = Description of Artificial Sequence: Synthetic oligonucleotide
  source 1..20: mol_type = other RNA
tagttgttctggtttctgaa

SEQ ID NO: 478 - RNA, 20 nt, synthetic construct
  misc_feature 1..20: note = Description of Artificial Sequence: Synthetic oligonucleotide
  source 1..20: mol_type = other RNA
ttttgttgttgtagttgttc

SEQ ID NO: 479 - RNA, 20 nt, synthetic construct
  misc_feature 1..20: note = Description of Artificial Sequence: Synthetic oligonucleotide
  source 1..20: mol_type = other RNA
tgttattttctgcaggagat

SEQ ID NO: 480 - RNA, 20 nt, synthetic construct
  misc_feature 1..20: note = Description of Artificial Sequence: Synthetic oligonucleotide
  source 1..20: mol_type = other RNA
atgttattttctgcaggaga

SEQ ID NO: 481 - RNA, 20 nt, synthetic construct
  misc_feature 1..20: note = Description of Artificial Sequence: Synthetic oligonucleotide
  source 1..20: mol_type = other RNA
ccctggatgttattttctgc

SEQ ID NO: 482 - RNA, 20 nt, synthetic construct
  misc_feature 1..20: note = Description of Artificial Sequence: Synthetic oligonucleotide
  source 1..20: mol_type = other RNA
acgctagctttgtggttccc

SEQ ID NO: 483 - RNA, 20 nt, synthetic construct
  misc_feature 1..20: note = Description of Artificial Sequence: Synthetic oligonucleotide
  source 1..20: mol_type = other RNA
ttcaccagacgctagctttg

SEQ ID NO: 484 - RNA, 20 nt, synthetic construct
  misc_feature 1..20: note = Description of Artificial Sequence: Synthetic oligonucleotide
  source 1..20: mol_type = other RNA
aggagcttgcaaattgctgc

SEQ ID NO: 485 - RNA, 20 nt, synthetic construct
  misc_feature 1..20: note = Description of Artificial Sequence: Synthetic oligonucleotide
  source 1..20: mol_type = other RNA
taccgttcagagctgccacc

SEQ ID NO: 486 - RNA, 20 nt, synthetic construct
  misc_feature 1..20: note = Description of Artificial Sequence: Synthetic oligonucleotide
  source 1..20: mol_type = other RNA
accacaccatcacccagaaa

SEQ ID NO: 487 - RNA, 20 nt, synthetic construct
  misc_feature 1..20: note = Description of Artificial Sequence: Synthetic oligonucleotide
  source 1..20: mol_type = other RNA
acctgtggaagaggaggagg

SEQ ID NO: 488 - RNA, 20 nt, synthetic construct
  misc_feature 1..20: note = Description of Artificial Sequence: Synthetic oligonucleotide
  source 1..20: mol_type = other RNA
aacctgtggaagaggaggag

SEQ ID NO: 489 - RNA, 20 nt, synthetic construct
  misc_feature 1..20: note = Description of Artificial Sequence: Synthetic oligonucleotide
  source 1..20: mol_type = other RNA
gaacctgtggaagaggagga

SEQ ID NO: 490 - RNA, 20 nt, synthetic construct
  misc_feature 1..20: note = Description of Artificial Sequence: Synthetic oligonucleotide
  source 1..20: mol_type = other RNA
ggaacctgtggaagaggagg

SEQ ID NO: 491 - RNA, 20 nt, synthetic construct
  misc_feature 1..20: note = Description of Artificial Sequence: Synthetic oligonucleotide
  source 1..20: mol_type = other RNA
tgaggaacctgtggaagagg

SEQ ID NO: 492 - RNA, 20 nt, synthetic construct
  misc_feature 1..20: note = Description of Artificial Sequence: Synthetic oligonucleotide
  source 1..20: mol_type = other RNA
agctgaggaacctgtggaag

SEQ ID NO: 493 - RNA, 20 nt, synthetic construct
  misc_feature 1..20: note = Description of Artificial Sequence: Synthetic oligonucleotide
  source 1..20: mol_type = other RNA
gaaggaagctgaggaacctg

SEQ ID NO: 494 - RNA, 20 nt, synthetic construct
  misc_feature 1..20: note = Description of Artificial Sequence: Synthetic oligonucleotide
  source 1..20: mol_type = other RNA
tttccttctgaaggaagctg

SEQ ID NO: 495 - RNA, 20 nt, synthetic construct
  misc_feature 1..20: note = Description of Artificial Sequence: Synthetic oligonucleotide
  source 1..20: mol_type = other RNA
agagtgctttttccttctga

SEQ ID NO: 496 - RNA, 20 nt, synthetic construct
  misc_feature 1..20: note = Description of Artificial Sequence: Synthetic oligonucleotide
  source 1..20: mol_type = other RNA
tactttggttggggtagtgg

SEQ ID NO: 497 - RNA, 20 nt, synthetic construct
  misc_feature 1..20: note = Description of Artificial Sequence: Synthetic oligonucleotide
  source 1..20: mol_type = other RNA
tgttactttggttggggtag

SEQ ID NO: 498 - RNA, 20 nt, synthetic construct
  misc_feature 1..20: note = Description of Artificial Sequence: Synthetic oligonucleotide
  source 1..20: mol_type = other RNA
gtgttgtgttactttggttg

SEQ ID NO: 499 - RNA, 20 nt, synthetic construct
  misc_feature 1..20: note = Description of Artificial Sequence: Synthetic oligonucleotide
  source 1..20: mol_type = other RNA
agtgttgtgttactttggtt

SEQ ID NO: 500 - RNA, 20 nt, synthetic construct
  misc_feature 1..20: note = Description of Artificial Sequence: Synthetic oligonucleotide
  source 1..20: mol_type = other RNA
aagtgttgtgttactttggt

SEQ ID NO: 501 - RNA, 20 nt, synthetic construct
  misc_feature 1..20: note = Description of Artificial Sequence: Synthetic oligonucleotide
  source 1..20: mol_type = other RNA
ttaaaagtgttgtgttactt

SEQ ID NO: 502 - RNA, 20 nt, synthetic construct
  misc_feature 1..20: note = Description of Artificial Sequence: Synthetic oligonucleotide
  source 1..20: mol_type = other RNA
ctctgggaaggtggtgcctc

SEQ ID NO: 503 - RNA, 20 nt, synthetic construct
  misc_feature 1..20: note = Description of Artificial Sequence: Synthetic oligonucleotide
  source 1..20: mol_type = other RNA
ggattaggactctgggaagg

SEQ ID NO: 504 - RNA, 20 nt, synthetic construct
  misc_feature 1..20: note = Description of Artificial Sequence: Synthetic oligonucleotide
  source 1..20: mol_type = other RNA
gatggattaggactctggga

SEQ ID NO: 505 - RNA, 20 nt, synthetic construct
  misc_feature 1..20: note = Description of Artificial Sequence: Synthetic oligonucleotide
  source 1..20: mol_type = other RNA
tgtagatggattaggactct

SEQ ID NO: 506 - RNA, 20 nt, synthetic construct
  misc_feature 1..20: note = Description of Artificial Sequence: Synthetic oligonucleotide
  source 1..20: mol_type = other RNA
gtgtagatggattaggactc

SEQ ID NO: 507 - RNA, 20 nt, synthetic construct
  misc_feature 1..20: note = Description of Artificial Sequence: Synthetic oligonucleotide
  source 1..20: mol_type = other RNA
catacatgtgtagatggatt

SEQ ID NO: 508 - RNA, 20 nt, synthetic construct
  misc_feature 1..20: note = Description of Artificial Sequence: Synthetic oligonucleotide
  source 1..20: mol_type = other RNA
gggctgcatacatgtgtaga

SEQ ID NO: 509 - RNA, 20 nt, synthetic construct
  misc_feature 1..20: note = Description of Artificial Sequence: Synthetic oligonucleotide
  source 1..20: mol_type = other RNA
tttcagaaagcatcggagaa

SEQ ID NO: 510 - RNA, 20 nt, synthetic construct
  misc_feature 1..20: note = Description of Artificial Sequence: Synthetic oligonucleotide
  source 1..20: mol_type = other RNA
ctttcagaaagcatcggaga

SEQ ID NO: 511 - RNA, 20 nt, synthetic construct
  misc_feature 1..20: note = Description of Artificial Sequence: Synthetic oligonucleotide
  source 1..20: mol_type = other RNA
tgaggcctttcagaaagcat

SEQ ID NO: 512 - RNA, 20 nt, synthetic construct
  misc_feature 1..20: note = Description of Artificial Sequence: Synthetic oligonucleotide
  source 1..20: mol_type = other RNA
ctgttcacacaattattctg

SEQ ID NO: 513 - RNA, 20 nt, synthetic construct
  misc_feature 1..20: note = Description of Artificial Sequence: Synthetic oligonucleotide
  source 1..20: mol_type = other RNA
cttgttttctcagaacacaa

SEQ ID NO: 514 - RNA, 20 nt, synthetic construct
  misc_feature 1..20: note = Description of Artificial Sequence: Synthetic oligonucleotide
  source 1..20: mol_type = other RNA
tgcttgaggtgttctgacat

SEQ ID NO: 515 - RNA, 20 nt, synthetic construct
  misc_feature 1..20: note = Description of Artificial Sequence: Synthetic oligonucleotide
  source 1..20: mol_type = other RNA
aaattggtgggttatgcttg

SEQ ID NO: 516 - RNA, 20 nt, synthetic construct
  misc_feature 1..20: note = Description of Artificial Sequence: Synthetic oligonucleotide
  source 1..20: mol_type = other RNA
cactgctaccaaaaattggt

SEQ ID NO: 517 - RNA, 20 nt, synthetic construct
  misc_feature 1..20: note = Description of Artificial Sequence: Synthetic oligonucleotide
  source 1..20: mol_type = other RNA
ccactgctaccaaaaattgg

SEQ ID NO: 518 - RNA, 20 nt, synthetic construct
  misc_feature 1..20: note = Description of Artificial Sequence: Synthetic oligonucleotide
  source 1..20: mol_type = other RNA
tctccactgctaccaaaaat

SEQ ID NO: 519 - RNA, 20 nt, synthetic construct
  misc_feature 1..20: note = Description of Artificial Sequence: Synthetic oligonucleotide
  source 1..20: mol_type = other RNA
ctttgtttctcatcaactgc

SEQ ID NO: 520 - RNA, 20 nt, synthetic construct
  misc_feature 1..20: note = Description of Artificial Sequence: Synthetic oligonucleotide
  source 1..20: mol_type = other RNA
ttcagatagtgctgtgttgg

SEQ ID NO: 521 - RNA, 20 nt, synthetic construct
  misc_feature 1..20: note = Description of Artificial Sequence: Synthetic oligonucleotide
  source 1..20: mol_type = other RNA
tttcagatagtgctgtgttg

SEQ ID NO: 522 - RNA, 20 nt, synthetic construct
  misc_feature 1..20: note = Description of Artificial Sequence: Synthetic oligonucleotide
  source 1..20: mol_type = other RNA
gtttcagatagtgctgtgtt

SEQ ID NO: 523 - RNA, 20 nt, synthetic construct
  misc_feature 1..20: note = Description of Artificial Sequence: Synthetic oligonucleotide
  source 1..20: mol_type = other RNA
ggtttcagatagtgctgtgt

SEQ ID NO: 524 - RNA, 20 nt, synthetic construct
  misc_feature 1..20: note = Description of Artificial Sequence: Synthetic oligonucleotide
  source 1..20: mol_type = other RNA
gccttcaattcaatccatcc

SEQ ID NO: 525 - RNA, 20 nt, synthetic construct
  misc_feature 1..20: note = Description of Artificial Sequence: Synthetic oligonucleotide
  source 1..20: mol_type = other RNA
ttccgcttggtgaaaacgag

SEQ ID NO: 526 - RNA, 20 nt, synthetic construct
  misc_feature 1..20: note = Description of Artificial Sequence: Synthetic oligonucleotide
  source 1..20: mol_type = other RNA
attccgcttggtgaaaacga

SEQ ID NO: 527 - RNA, 20 nt, synthetic construct
  misc_feature 1..20: note = Description of Artificial Sequence: Synthetic oligonucleotide
  source 1..20: mol_type = other RNA
gattccgcttggtgaaaacg

SEQ ID NO: 528 - RNA, 20 nt, synthetic construct
  misc_feature 1..20: note = Description of Artificial Sequence: Synthetic oligonucleotide
  source 1..20: mol_type = other RNA
gttttagatgggattccgct

SEQ ID NO: 529 - RNA, 20 nt, synthetic construct
  misc_feature 1..20: note = Description of Artificial Sequence: Synthetic oligonucleotide
  source 1..20: mol_type = other RNA
tgcctcattacgttttagat

SEQ ID NO: 530 - RNA, 20 nt, synthetic construct
  misc_feature 1..20: note = Description of Artificial Sequence: Synthetic oligonucleotide
  source 1..20: mol_type = other RNA
atgcctcattacgttttaga

SEQ ID NO: 531 - RNA, 20 nt, synthetic construct
  misc_feature 1..20: note = Description of Artificial Sequence: Synthetic oligonucleotide
  source 1..20: mol_type = other RNA
ggttgatactgaagaattga

SEQ ID NO: 532 - RNA, 20 nt, synthetic construct
  misc_feature 1..20: note = Description of Artificial Sequence: Synthetic oligonucleotide
  source 1..20: mol_type = other RNA
gtcatttgattggagagatt

SEQ ID NO: 533 - RNA, 20 nt, synthetic construct
  misc_feature 1..20: note = Description of Artificial Sequence: Synthetic oligonucleotide
  source 1..20: mol_type = other RNA
ggtcatttgattggagagat

SEQ ID NO: 534 - RNA, 20 nt, synthetic construct
  misc_feature 1..20: note = Description of Artificial Sequence: Synthetic oligonucleotide
  source 1..20: mol_type = other RNA
ttgtttggaggtcatttgat

SEQ ID NO: 535 - RNA, 20 nt, synthetic construct
  misc_feature 1..20: note = Description of Artificial Sequence: Synthetic oligonucleotide
  source 1..20: mol_type = other RNA
atttccagtgtattgtttgg

SEQ ID NO: 536 - RNA, 20 nt, synthetic construct
  misc_feature 1..20: note = Description of Artificial Sequence: Synthetic oligonucleotide
  source 1..20: mol_type = other RNA
ggaatttccagtgtattgtt

SEQ ID NO: 537 - RNA, 20 nt, synthetic construct
  misc_feature 1..20: note = Description of Artificial Sequence: Synthetic oligonucleotide
  source 1..20: mol_type = other RNA
tgggagccccccaggcatgt

SEQ ID NO: 538 - RNA, 20 nt, synthetic construct
  misc_feature 1..20: note = Description of Artificial Sequence: Synthetic oligonucleotide
  source 1..20: mol_type = other RNA
gcttgccttgggagcccccc

SEQ ID NO: 539 - RNA, 20 nt, synthetic construct
  misc_feature 1..20: note = Description of Artificial Sequence: Synthetic oligonucleotide
  source 1..20: mol_type = other RNA
tctgggtgtaagcttgcctt

SEQ ID NO: 540 - RNA, 20 nt, synthetic construct
  misc_feature 1..20: note = Description of Artificial Sequence: Synthetic oligonucleotide
  source 1..20: mol_type = other RNA
ttctgggtgtaagcttgcct

SEQ ID NO: 541 - RNA, 20 nt, synthetic construct
  misc_feature 1..20: note = Description of Artificial Sequence: Synthetic oligonucleotide
  source 1..20: mol_type = other RNA
ctccagctgtgttgttttct

SEQ ID NO: 542 - RNA, 20 nt, synthetic construct
  misc_feature 1..20: note = Description of Artificial Sequence: Synthetic oligonucleotide
  source 1..20: mol_type = other RNA
gctccagctgtgttgttttc

SEQ ID NO: 543 - RNA, 20 nt, synthetic construct
  misc_feature 1..20: note = Description of Artificial Sequence: Synthetic oligonucleotide
  source 1..20: mol_type = other RNA
gcccttgattcatttcaact

SEQ ID NO: 544 - RNA, 20 nt, synthetic construct
  misc_feature 1..20: note = Description of Artificial Sequence: Synthetic oligonucleotide
  source 1..20: mol_type = other RNA
atgttggtccactgtacctt

SEQ ID NO: 545 - RNA, 20 nt, synthetic construct
  misc_feature 1..20: note = Description of Artificial Sequence: Synthetic oligonucleotide
  source 1..20: mol_type = other RNA
gatgttggtccactgtacct

SEQ ID NO: 546 - RNA, 20 nt, synthetic construct
  misc_feature 1..20: note = Description of Artificial Sequence: Synthetic oligonucleotide
  source 1..20: mol_type = other RNA
gtttttggaactggagatgt

SEQ ID NO: 547 - RNA, 20 nt, synthetic construct
  misc_feature 1..20: note = Description of Artificial Sequence: Synthetic oligonucleotide
  source 1..20: mol_type = other RNA
ggtgtgagggtttttggaac

SEQ ID NO: 548 - RNA, 20 nt, synthetic construct
  misc_feature 1..20: note = Description of Artificial Sequence: Synthetic oligonucleotide
  source 1..20: mol_type = other RNA
gcacctggtgtgagggtttt

SEQ ID NO: 549 - RNA, 20 nt, synthetic construct
  misc_feature 1..20: note = Description of Artificial Sequence: Synthetic oligonucleotide
  source 1..20: mol_type = other RNA
gagaagtgcacctggtgtga

SEQ ID NO: 550 - RNA, 20 nt, synthetic construct
  misc_feature 1..20: note = Description of Artificial Sequence: Synthetic oligonucleotide
  source 1..20: mol_type = other RNA
ggagaagtgcacctggtgtg

SEQ ID NO: 551 - RNA, 20 nt, synthetic construct
  misc_feature 1..20: note = Description of Artificial Sequence: Synthetic oligonucleotide
  source 1..20: mol_type = other RNA
ctgttttggagaagtgcacc

SEQ ID NO: 552 - RNA, 20 nt, synthetic construct
  misc_feature 1..20: note = Description of Artificial Sequence: Synthetic oligonucleotide
  source 1..20: mol_type = other RNA
ttttggtaaatggtctgttt

SEQ ID NO: 553 - RNA, 20 nt, synthetic construct
  misc_feature 1..20: note = Description of Artificial Sequence: Synthetic oligonucleotide
  source 1..20: mol_type = other RNA
gcacatgagcttttggtaaa

SEQ ID NO: 554 - RNA, 20 nt, synthetic construct
  misc_feature 1..20: note = Description of Artificial Sequence: Synthetic oligonucleotide
  source 1..20: mol_type = other RNA
agtgactgcacatgagcttt

SEQ ID NO: 555 - RNA, 20 nt, synthetic construct
  misc_feature 1..20: note = Description of Artificial Sequence: Synthetic oligonucleotide
  source 1..20: mol_type = other RNA
ggacataagtttttcagttt

SEQ ID NO: 556 - RNA, 20 nt, synthetic construct
  misc_feature 1..20: note = Description of Artificial Sequence: Synthetic oligonucleotide
  source 1..20: mol_type = other RNA
gggacataagtttttcagtt

SEQ ID NO: 557 - RNA, 20 nt, synthetic construct
  misc_feature 1..20: note = Description of Artificial Sequence: Synthetic oligonucleotide
  source 1..20: mol_type = other RNA
caagtgctgtttcaacactg

SEQ ID NO: 558 - RNA, 20 nt, synthetic construct
  misc_feature 1..20: note = Description of Artificial Sequence: Synthetic oligonucleotide
  source 1..20: mol_type = other RNA
tcaagtgctgtttcaacact

SEQ ID NO: 559 - RNA, 20 nt, synthetic construct
  misc_feature 1..20: note = Description of Artificial Sequence: Synthetic oligonucleotide
  source 1..20: mol_type = other RNA
ttcaagtgctgtttcaacac

SEQ ID NO: 560 - RNA, 20 nt, synthetic construct
  misc_feature 1..20: note = Description of Artificial Sequence: Synthetic oligonucleotide
  source 1..20: mol_type = other RNA
aaaaggtgtgagtttgaaaa

SEQ ID NO: 561 - RNA, 20 nt, synthetic construct
  misc_feature 1..20: note = Description of Artificial Sequence: Synthetic oligonucleotide
  source 1..20: mol_type = other RNA
tatgaggcttatgttgcaaa

SEQ ID NO: 562 - RNA, 20 nt, synthetic construct
  misc_feature 1..20: note = Description of Artificial Sequence: Synthetic oligonucleotide
  source 1..20: mol_type = other RNA
gtttgtgctgcctgtttatg

SEQ ID NO: 563 - RNA, 20 nt, synthetic construct
  misc_feature 1..20: note = Description of Artificial Sequence: Synthetic oligonucleotide
  source 1..20: mol_type = other RNA
gggagatgtgaactctggga

SEQ ID NO: 564 - RNA, 20 nt, synthetic construct
  misc_feature 1..20: note = Description of Artificial Sequence: Synthetic oligonucleotide
  source 1..20: mol_type = other RNA
ttgagggagatgtgaactct

SEQ ID NO: 565 - RNA, 20 nt, synthetic construct
  misc_feature 1..20: note = Description of Artificial Sequence: Synthetic oligonucleotide
  source 1..20: mol_type = other RNA
tttgagggagatgtgaactc

SEQ ID NO: 566 - RNA, 20 nt, synthetic construct
  misc_feature 1..20: note = Description of Artificial Sequence: Synthetic oligonucleotide
  source 1..20: mol_type = other RNA
gctgctgttgctggttttga

SEQ ID NO: 567 - RNA, 20 nt, synthetic construct
  misc_feature 1..20: note = Description of Artificial Sequence: Synthetic oligonucleotide
  source 1..20: mol_type = other RNA
tgctgctgttgctggttttg

SEQ ID NO: 568 - RNA, 20 nt, synthetic construct
  misc_feature 1..20: note = Description of Artificial Sequence: Synthetic oligonucleotide
  source 1..20: mol_type = other RNA
gtaatttttgctgctgttgc

SEQ ID NO: 569 - RNA, 20 nt, synthetic construct
  misc_feature 1..20: note = Description of Artificial Sequence: Synthetic oligonucleotide
  source 1..20: mol_type = other RNA
tttgggggtgaggaaaagtc

SEQ ID NO: 570 - RNA, 20 nt, synthetic construct
  misc_feature 1..20: note = Description of Artificial Sequence: Synthetic oligonucleotide
  source 1..20: mol_type = other RNA
tcattgttgctttgggggtg

SEQ ID NO: 571 - RNA, 20 nt, synthetic construct
  misc_feature 1..20: note = Description of Artificial Sequence: Synthetic oligonucleotide
  source 1..20: mol_type = other RNA
gctgatcattgttgctttgg

SEQ ID NO: 572 - RNA, 20 nt, synthetic construct
  misc_feature 1..20: note = Description of Artificial Sequence: Synthetic oligonucleotide
  source 1..20: mol_type = other RNA
tgctgatcattgttgctttg

SEQ ID NO: 573 - RNA, 20 nt, synthetic construct
  misc_feature 1..20: note = Description of Artificial Sequence: Synthetic oligonucleotide
  source 1..20: mol_type = other RNA
ttgctgatcattgttgcttt

SEQ ID NO: 574 - RNA, 20 nt, synthetic construct
  misc_feature 1..20: note = Description of Artificial Sequence: Synthetic oligonucleotide
  source 1..20: mol_type = other RNA
tttgctgatcattgttgctt

SEQ ID NO: 575 - RNA, 20 nt, synthetic construct
  misc_feature 1..20: note = Description of Artificial Sequence: Synthetic oligonucleotide
  source 1..20: mol_type = other RNA
aacattcttccactttagtc

SEQ ID NO: 576 - RNA, 20 nt, synthetic construct
  misc_feature 1..20: note = Description of Artificial Sequence: Synthetic oligonucleotide
  source 1..20: mol_type = other RNA
gtacttcctccagtcccatt

SEQ ID NO: 577 - RNA, 20 nt, synthetic construct
  misc_feature 1..20: note = Description of Artificial Sequence: Synthetic oligonucleotide
  source 1..20: mol_type = other RNA
tttcatggtctgactataag

SEQ ID NO: 578 - RNA, 20 nt, synthetic construct
  misc_feature 1..20: note = Description of Artificial Sequence: Synthetic oligonucleotide
  source 1..20: mol_type = other RNA
atttcatggtctgactataa

SEQ ID NO: 579 - RNA, 20 nt, synthetic construct
  misc_feature 1..20: note = Description of Artificial Sequence: Synthetic oligonucleotide
  source 1..20: mol_type = other RNA
gatttcatggtctgactata

SEQ ID NO: 580 - RNA, 20 nt, synthetic construct
  misc_feature 1..20: note = Description of Artificial Sequence: Synthetic oligonucleotide
  source 1..20: mol_type = other RNA
tttgcatgcacttgatttca

SEQ ID NO: 581 - RNA, 20 nt, synthetic construct
  misc_feature 1..20: note = Description of Artificial Sequence: Synthetic oligonucleotide
  source 1..20: mol_type = other RNA
gttctttattctctgaaact

SEQ ID NO: 582 - RNA, 20 nt, synthetic construct
  misc_feature 1..20: note = Description of Artificial Sequence: Synthetic oligonucleotide
  source 1..20: mol_type = other RNA
ttgtttcctgcaaaaagttc

SEQ ID NO: 583 - RNA, 20 nt, synthetic construct
  misc_feature 1..20: note = Description of Artificial Sequence: Synthetic oligonucleotide
  source 1..20: mol_type = other RNA
ttgcatgtgatgcaagtttt

SEQ ID NO: 584 - RNA, 20 nt, synthetic construct
  misc_feature 1..20: note = Description of Artificial Sequence: Synthetic oligonucleotide
  source 1..20: mol_type = other RNA
attgcatgtgatgcaagttt

SEQ ID NO: 585 - RNA, 20 nt, synthetic construct
  misc_feature 1..20: note = Description of Artificial Sequence: Synthetic oligonucleotide
  source 1..20: mol_type = other RNA
tgctttgggatcacattatt

SEQ ID NO: 586 - RNA, 20 nt, synthetic construct
  misc_feature 1..20: note = Description of Artificial Sequence: Synthetic oligonucleotide
  source 1..20: mol_type = other RNA
tgtgaagaagatcttgcttt

SEQ ID NO: 587 - RNA, 20 nt, synthetic construct
  misc_feature 1..20: note = Description of Artificial Sequence: Synthetic oligonucleotide
  source 1..20: mol_type = other RNA
ctgtgaagaagatcttgctt

SEQ ID NO: 588 - RNA, 20 nt, synthetic construct
  misc_feature 1..20: note = Description of Artificial Sequence: Synthetic oligonucleotide
  source 1..20: mol_type = other RNA
cttgttgaccagacatatct

SEQ ID NO: 589 - RNA, 20 nt, synthetic construct
  misc_feature 1..20: note = Description of Artificial Sequence: Synthetic oligonucleotide
  source 1..20: mol_type = other RNA
gcacaggaaaaacatttgca

SEQ ID NO: 590 - RNA, 20 nt, synthetic construct
  misc_feature 1..20: note = Description of Artificial Sequence: Synthetic oligonucleotide
  source 1..20: mol_type = other RNA
cttcctccctggtcaggcac

SEQ ID NO: 591 - RNA, 20 nt, synthetic construct
  misc_feature 1..20: note = Description of Artificial Sequence: Synthetic oligonucleotide
  source 1..20: mol_type = other RNA
gtgtgacttcctccctggtc

SEQ ID NO: 592 - RNA, 20 nt, synthetic construct
  misc_feature 1..20: note = Description of Artificial Sequence: Synthetic oligonucleotide
  source 1..20: mol_type = other RNA
tctgagtgtgacttcctccc

SEQ ID NO: 593 - RNA, 20 nt, synthetic construct
  misc_feature 1..20: note = Description of Artificial Sequence: Synthetic oligonucleotide
  source 1..20: mol_type = other RNA
ttgagtgtccttctggggag

SEQ ID NO: 594 - RNA, 20 nt, synthetic construct
  misc_feature 1..20: note = Description of Artificial Sequence: Synthetic oligonucleotide
  source 1..20: mol_type = other RNA
tttgagtgtccttctgggga

SEQ ID NO: 595 - RNA, 20 nt, synthetic construct
  misc_feature 1..20: note = Description of Artificial Sequence: Synthetic oligonucleotide
  source 1..20: mol_type = other RNA
ttttgagtgtccttctgggg

SEQ ID NO: 596 - RNA, 20 nt, synthetic construct
  misc_feature 1..20: note = Description of Artificial Sequence: Synthetic oligonucleotide
  source 1..20: mol_type = other RNA
tgcttttgagtgtccttctg

SEQ ID NO: 597 - RNA, 20 nt, synthetic construct
  misc_feature 1..20: note = Description of Artificial Sequence: Synthetic oligonucleotide
  source 1..20: mol_type = other RNA
atgcttttgagtgtccttct

SEQ ID NO: 598 - RNA, 20 nt, synthetic construct
  misc_feature 1..20: note = Description of Artificial Sequence: Synthetic oligonucleotide
  source 1..20: mol_type = other RNA
catgcttttgagtgtccttc

SEQ ID NO: 599 - RNA, 20 nt, synthetic construct
  misc_feature 1..20: note = Description of Artificial Sequence: Synthetic oligonucleotide
  source 1..20: mol_type = other RNA
ctatggcaagactcagtttg

SEQ ID NO: 600 - RNA, 20 nt, synthetic construct
  misc_feature 1..20: note = Description of Artificial Sequence: Synthetic oligonucleotide
  source 1..20: mol_type = other RNA
actatggcaagactcagttt

SEQ ID NO: 601 - RNA, 20 nt, synthetic construct
  misc_feature 1..20: note = Description of Artificial Sequence: Synthetic oligonucleotide
  source 1..20: mol_type = other RNA
gactatggcaagactcagtt

SEQ ID NO: 602 - RNA, 20 nt, synthetic construct
  misc_feature 1..20: note = Description of Artificial Sequence: Synthetic oligonucleotide
  source 1..20: mol_type = other RNA
ttggcctgtgcatctgacta

SEQ ID NO: 603 - RNA, 20 nt, synthetic construct
  misc_feature 1..20: note = Description of Artificial Sequence: Synthetic oligonucleotide
  source 1..20: mol_type = other RNA
catccaggttccaccttaat

SEQ ID NO: 604 - RNA, 20 nt, synthetic construct
  misc_feature 1..20: note = Description of Artificial Sequence: Synthetic oligonucleotide
  source 1..20: mol_type = other RNA
caggcatgtggcttgcatcc

SEQ ID NO: 605 - RNA, 20 nt, synthetic construct
  misc_feature 1..20: note = Description of Artificial Sequence: Synthetic oligonucleotide
  source 1..20: mol_type = other RNA
gctgtgtgcatacaggcatg

SEQ ID NO: 606 - RNA, 20 nt, synthetic construct
  misc_feature 1..20: note = Description of Artificial Sequence: Synthetic oligonucleotide
  source 1..20: mol_type = other RNA
tggtggtgctgtgtgcatac

SEQ ID NO: 607 - RNA, 20 nt, synthetic construct
  misc_feature 1..20: note = Description of Artificial Sequence: Synthetic oligonucleotide
  source 1..20: mol_type = other RNA
ttccatgttttgttttctgg

SEQ ID NO: 608 - RNA, 20 nt, synthetic construct
  misc_feature 1..20: note = Description of Artificial Sequence: Synthetic oligonucleotide
  source 1..20: mol_type = other RNA
tttttccatgttttgttttc

SEQ ID NO: 609 - RNA, 20 nt, synthetic construct
  misc_feature 1..20: note = Description of Artificial Sequence: Synthetic oligonucleotide
  source 1..20: mol_type = other RNA
acattatcacagcttgcagg

SEQ ID NO: 610 - RNA, 20 nt, synthetic construct
  misc_feature 1..20: note = Description of Artificial Sequence: Synthetic oligonucleotide
  source 1..20: mol_type = other RNA
tgcacattatcacagcttgc

SEQ ID NO: 611 - RNA, 20 nt, synthetic construct
  misc_feature 1..20: note = Description of Artificial Sequence: Synthetic oligonucleotide
  source 1..20: mol_type = other RNA
ctgcttcagatgctgctcca

SEQ ID NO: 612 - RNA, 20 nt, synthetic construct
  misc_feature 1..20: note = Description of Artificial Sequence: Synthetic oligonucleotide
  source 1..20: mol_type = other RNA
cttatggtcaaataacgact

SEQ ID NO: 613 - RNA, 20 nt, synthetic construct
  misc_feature 1..20: note = Description of Artificial Sequence: Synthetic oligonucleotide
  source 1..20: mol_type = other RNA
atttgagagtaagagcctta

SEQ ID NO: 614 - RNA, 20 nt, synthetic construct
  misc_feature 1..20: note = Description of Artificial Sequence: Synthetic oligonucleotide
  source 1..20: mol_type = other RNA
tgtctagtcaaaactgtgac

SEQ ID NO: 615 - RNA, 20 nt, synthetic construct
  misc_feature 1..20: note = Description of Artificial Sequence: Synthetic oligonucleotide
  source 1..20: mol_type = other RNA
gctatcaagttctgcagcag

SEQ ID NO: 616 - RNA, 20 nt, synthetic construct
  misc_feature 1..20: note = Description of Artificial Sequence: Synthetic oligonucleotide
  source 1..20: mol_type = other RNA
gctgctctaaagctggggtg

SEQ ID NO: 617 - RNA, 20 nt, synthetic construct
  misc_feature 1..20: note = Description of Artificial Sequence: Synthetic oligonucleotide
  source 1..20: mol_type = other RNA
tgtttgctgctctaaagctg

SEQ ID NO: 618 - RNA, 20 nt, synthetic construct
  misc_feature 1..20: note = Description of Artificial Sequence: Synthetic oligonucleotide
  source 1..20: mol_type = other RNA
ttgtttgctgctctaaagct

SEQ ID NO: 619 - RNA, 20 nt, synthetic construct
  misc_feature 1..20: note = Description of Artificial Sequence: Synthetic oligonucleotide
  source 1..20: mol_type = other RNA
gttgtttgctgctctaaagc

SEQ ID NO: 620 - RNA, 20 nt, synthetic construct
  misc_feature 1..20: note = Description of Artificial Sequence: Synthetic oligonucleotide
  source 1..20: mol_type = other RNA
gaagcagctgttcttttggt

SEQ ID NO: 621 - RNA, 20 nt, synthetic construct
  misc_feature 1..20: note = Description of Artificial Sequence: Synthetic oligonucleotide
  source 1..20: mol_type = other RNA
aacagaagcagctgttcttt

SEQ ID NO: 622 - RNA, 20 nt, synthetic construct
  misc_feature 1..20: note = Description of Artificial Sequence: Synthetic oligonucleotide
  source 1..20: mol_type = other RNA
ggagtatctagtaatttgga

SEQ ID NO: 623 - RNA, 20 nt, synthetic construct
  misc_feature 1..20: note = Description of Artificial Sequence: Synthetic oligonucleotide
  source 1..20: mol_type = other RNA
tataggagtatctagtaatt

SEQ ID NO: 624 - RNA, 20 nt, synthetic construct
  misc_feature 1..20: note = Description of Artificial Sequence: Synthetic oligonucleotide
  source 1..20: mol_type = other RNA
gtatccaataaattttttat

SEQ ID NO: 625 - RNA, 20 nt, synthetic construct
  misc_feature 1..20: note = Description of Artificial Sequence: Synthetic oligonucleotide
  source 1..20: mol_type = other RNA
aaatcatattgagtcttgac

SEQ ID NO: 626 - RNA, 20 nt, synthetic construct
  misc_feature 1..20: note = Description of Artificial Sequence: Synthetic oligonucleotide
  source 1..20: mol_type = other RNA
tacctacacatctgcaagat

SEQ ID NO: 627 - RNA, 20 nt, synthetic construct
  misc_feature 1..20: note = Description of Artificial Sequence: Synthetic oligonucleotide
  source 1..20: mol_type = other RNA
ttacctacacatctgcaaga

SEQ ID NO: 628 - RNA, 20 nt, synthetic construct
  misc_feature 1..20: note = Description of Artificial Sequence: Synthetic oligonucleotide
  source 1..20: mol_type = other RNA
catgtgtctcagtacatttc

SEQ ID NO: 629 - RNA, 20 nt, synthetic construct
  misc_feature 1..20: note = Description of Artificial Sequence: Synthetic oligonucleotide
  source 1..20: mol_type = other RNA
gaagataaatttgctaattc

SEQ ID NO: 630 - RNA, 20 nt, synthetic construct
  misc_feature 1..20: note = Description of Artificial Sequence: Synthetic oligonucleotide
  source 1..20: mol_type = other RNA
actcaagatttaaaaaaaga

SEQ ID NO: 631 - RNA, 20 nt, synthetic construct
  misc_feature 1..20: note = Description of Artificial Sequence: Synthetic oligonucleotide
  source 1..20: mol_type = other RNA
ctttcacaagacacaagcat

SEQ ID NO: 632 - RNA, 20 nt, synthetic construct
  misc_feature 1..20: note = Description of Artificial Sequence: Synthetic oligonucleotide
  source 1..20: mol_type = other RNA
gcacgattatttaattcttt

SEQ ID NO: 633 - RNA, 20 nt, synthetic construct
  misc_feature 1..20: note = Description of Artificial Sequence: Synthetic oligonucleotide
  source 1..20: mol_type = other RNA
ttttacaggatctgaagaga

SEQ ID NO: 634 - RNA, 20 nt, synthetic construct
  misc_feature 1..20: note = Description of Artificial Sequence: Synthetic oligonucleotide
  source 1..20: mol_type = other RNA
attttacaggatctgaagag

SEQ ID NO: 635 - RNA, 20 nt, synthetic construct
  misc_feature 1..20: note = Description of Artificial Sequence: Synthetic oligonucleotide
  source 1..20: mol_type = other RNA
cagatacattcaaattttac

SEQ ID NO: 636 - RNA, 20 nt, synthetic construct
  misc_feature 1..20: note = Description of Artificial Sequence: Synthetic oligonucleotide
  source 1..20: mol_type = other RNA
taatatacaaagagctaaat

SEQ ID NO: 637 - RNA, 20 nt, synthetic construct
  misc_feature 1..20: note = Description of Artificial Sequence: Synthetic oligonucleotide
  source 1..20: mol_type = other RNA
tgctgcctagctgtctctcc

SEQ ID NO: 638 - RNA, 20 nt, synthetic construct
  misc_feature 1..20: note = Description of Artificial Sequence: Synthetic oligonucleotide
  source 1..20: mol_type = other RNA
ttcgtacattagactgccta

SEQ ID NO: 639 - RNA, 20 nt, synthetic construct
  misc_feature 1..20: note = Description of Artificial Sequence: Synthetic oligonucleotide
  source 1..20: mol_type = other RNA
aatggagaaaaggaaacttt

SEQ ID NO: 640 - RNA, 20 nt, synthetic construct
  misc_feature 1..20: note = Description of Artificial Sequence: Synthetic oligonucleotide
  source 1..20: mol_type = other RNA
caaatgtataaatggagaaa

SEQ ID NO: 641 - RNA, 20 nt, synthetic construct
  misc_feature 1..20: note = Description of Artificial Sequence: Synthetic oligonucleotide
  source 1..20: mol_type = other RNA
caacattccaaatgtataaa

SEQ ID NO: 642 - RNA, 20 nt, synthetic construct
  misc_feature 1..20: note = Description of Artificial Sequence: Synthetic oligonucleotide
  source 1..20: mol_type = other RNA
agatgaaattttagagaaaa

SEQ ID NO: 643 - RNA, 20 nt, synthetic construct
  misc_feature 1..20: note = Description of Artificial Sequence: Synthetic oligonucleotide
  source 1..20: mol_type = other RNA
aagatgaaattttagagaaa

SEQ ID NO: 644 - RNA, 20 nt, synthetic construct
  misc_feature 1..20: note = Description of Artificial Sequence: Synthetic oligonucleotide
  source 1..20: mol_type = other RNA
agggaaaacatggcacgggt

SEQ ID NO: 645 - RNA, 20 nt, synthetic construct
  misc_feature 1..20: note = Description of Artificial Sequence: Synthetic oligonucleotide
  source 1..20: mol_type = other RNA
caagagggaaaacatggcac

SEQ ID NO: 646 - RNA, 20 nt, synthetic construct
  misc_feature 1..20: note = Description of Artificial Sequence: Synthetic oligonucleotide
  source 1..20: mol_type = other RNA
gcaagagggaaaacatggca

SEQ ID NO: 647 - RNA, 20 nt, synthetic construct
  misc_feature 1..20: note = Description of Artificial Sequence: Synthetic oligonucleotide
  source 1..20: mol_type = other RNA
tcattgcaagagggaaaaca

SEQ ID NO: 648 - RNA, 20 nt, synthetic construct
  misc_feature 1..20: note = Description of Artificial Sequence: Synthetic oligonucleotide
  source 1..20: mol_type = other RNA
tggggtatctcattgcaaga

SEQ ID NO: 649 - RNA, 20 nt, synthetic construct
  misc_feature 1..20: note = Description of Artificial Sequence: Synthetic oligonucleotide
  source 1..20: mol_type = other RNA
gtggggtatctcattgcaag

SEQ ID NO: 650 - RNA, 20 nt, synthetic construct
  misc_feature 1..20: note = Description of Artificial Sequence: Synthetic oligonucleotide
  source 1..20: mol_type = other RNA
ccatccttctacacagtgtg

SEQ ID NO: 651 - RNA, 20 nt, synthetic construct
  misc_feature 1..20: note = Description of Artificial Sequence: Synthetic oligonucleotide
  source 1..20: mol_type = other RNA
tccatccttctacacagtgt

SEQ ID NO: 652 - RNA, 20 nt, synthetic construct
  misc_feature 1..20: note = Description of Artificial Sequence: Synthetic oligonucleotide
  source 1..20: mol_type = other RNA
ctccatccttctacacagtg

SEQ ID NO: 653 - RNA, 20 nt, synthetic construct
  misc_feature 1..20: note = Description of Artificial Sequence: Synthetic oligonucleotide
  source 1..20: mol_type = other RNA
cacacgcaaagagggacagt

SEQ ID NO: 654 - RNA, 20 nt, synthetic construct
  misc_feature 1..20: note = Description of Artificial Sequence: Synthetic oligonucleotide
  source 1..20: mol_type = other RNA
ttaataaccacacgcaaaga

SEQ ID NO: 655 - RNA, 20 nt, synthetic construct
  misc_feature 1..20: note = Description of Artificial Sequence: Synthetic oligonucleotide
  source 1..20: mol_type = other RNA
cttaataaccacacgcaaag

SEQ ID NO: 656 - RNA, 20 nt, synthetic construct
  misc_feature 1..20: note = Description of Artificial Sequence: Synthetic oligonucleotide
  source 1..20: mol_type = other RNA
tgtggtgttttagcccagtg

SEQ ID NO: 657 - RNA, 20 nt, synthetic construct
  misc_feature 1..20: note = Description of Artificial Sequence: Synthetic oligonucleotide
  source 1..20: mol_type = other RNA
aatattatctatgagatgtg

SEQ ID NO: 658 - RNA, 20 nt, synthetic construct
  misc_feature 1..20: note = Description of Artificial Sequence: Synthetic oligonucleotide
  source 1..20: mol_type = other RNA
aaaagtgggaagataggggt

SEQ ID NO: 659 - RNA, 20 nt, synthetic construct
  misc_feature 1..20: note = Description of Artificial Sequence: Synthetic oligonucleotide
  source 1..20: mol_type = other RNA
gaaaagtgggaagatagggg

SEQ ID NO: 660 - RNA, 20 nt, synthetic construct
  misc_feature 1..20: note = Description of Artificial Sequence: Synthetic oligonucleotide
  source 1..20: mol_type = other RNA
atggaaaagtgggaagatag

SEQ ID NO: 661 - RNA, 20 nt, synthetic construct
  misc_feature 1..20: note = Description of Artificial Sequence: Synthetic oligonucleotide
  source 1..20: mol_type = other RNA
gatggaaaagtgggaagata

SEQ ID NO: 662 - RNA, 20 nt, synthetic construct
  misc_feature 1..20: note = Description of Artificial Sequence: Synthetic oligonucleotide
  source 1..20: mol_type = other RNA
agatggaaaagtgggaagat

SEQ ID NO: 663 - RNA, 20 nt, synthetic construct
  misc_feature 1..20: note = Description of Artificial Sequence: Synthetic oligonucleotide
  source 1..20: mol_type = other RNA
accaacaaagatggaaaagt

SEQ ID NO: 664 - RNA, 20 nt, synthetic construct
  misc_feature 1..20: note = Description of Artificial Sequence: Synthetic oligonucleotide
  source 1..20: mol_type = other RNA
aaccaacaaagatggaaaag

SEQ ID NO: 665 - RNA, 20 nt, synthetic construct
  misc_feature 1..20: note = Description of Artificial Sequence: Synthetic oligonucleotide
  source 1..20: mol_type = other RNA
ctgttgcaaaccaacaaaga

SEQ ID NO: 666 - RNA, 20 nt, synthetic construct
  misc_feature 1..20: note = Description of Artificial Sequence: Synthetic oligonucleotide
  source 1..20: mol_type = other RNA
gagagtcaggcaaaaagaag

SEQ ID NO: 667 - RNA, 20 nt, synthetic construct
  misc_feature 1..20: note = Description of Artificial Sequence: Synthetic oligonucleotide
  source 1..20: mol_type = other RNA
ggagagtcaggcaaaaagaa

SEQ ID NO: 668 - RNA, 20 nt, synthetic construct
  misc_feature 1..20: note = Description of Artificial Sequence: Synthetic oligonucleotide
  source 1..20: mol_type = other RNA
tggagagtcaggcaaaaaga

SEQ ID NO: 669 - RNA, 20 nt, synthetic construct
  misc_feature 1..20: note = Description of Artificial Sequence: Synthetic oligonucleotide
  source 1..20: mol_type = other RNA
agagaaaatcctggagagtc

SEQ ID NO: 670 - RNA, 20 nt, synthetic construct
  misc_feature 1..20: note = Description of Artificial Sequence: Synthetic oligonucleotide
  source 1..20: mol_type = other RNA
tttatgatgagagaaaatcc

SEQ ID NO: 671 - RNA, 20 nt, synthetic construct
  misc_feature 1..20: note = Description of Artificial Sequence: Synthetic oligonucleotide
  source 1..20: mol_type = other RNA
tattgcttggtttattgtca

SEQ ID NO: 672 - RNA, 20 nt, synthetic construct
  misc_feature 1..20: note = Description of Artificial Sequence: Synthetic oligonucleotide
  source 1..20: mol_type = other RNA
cccacccccagaatattgct

SEQ ID NO: 673 - RNA, 20 nt, synthetic construct
  misc_feature 1..20: note = Description of Artificial Sequence: Synthetic oligonucleotide
  source 1..20: mol_type = other RNA
ctggaagcctacctattact

SEQ ID NO: 674 - RNA, 20 nt, synthetic construct
  misc_feature 1..20: note = Description of Artificial Sequence: Synthetic oligonucleotide
  source 1..20: mol_type = other RNA
aaaaaacatttaaagctaac

SEQ ID NO: 675 - RNA, 20 nt, synthetic construct
  misc_feature 1..20: note = Description of Artificial Sequence: Synthetic oligonucleotide
  source 1..20: mol_type = other RNA
tacaatccaattttttgagc

SEQ ID NO: 676 - RNA, 20 nt, synthetic construct
  misc_feature 1..20: note = Description of Artificial Sequence: Synthetic oligonucleotide
  source 1..20: mol_type = other RNA
ctaaacaaagaatacagtga

SEQ ID NO: 677 - RNA, 20 nt, synthetic construct
  misc_feature 1..20: note = Description of Artificial Sequence: Synthetic oligonucleotide
  source 1..20: mol_type = other RNA
actaaacaaagaatacagtg

SEQ ID NO: 678 - RNA, 20 nt, synthetic construct
  misc_feature 1..20: note = Description of Artificial Sequence: Synthetic oligonucleotide
  source 1..20: mol_type = other RNA
atatattacatttcagatat

SEQ ID NO: 679 - RNA, 20 nt, synthetic construct
  misc_feature 1..20: note = Description of Artificial Sequence: Synthetic oligonucleotide
  source 1..20: mol_type = other RNA
aatatattacatttcagata

SEQ ID NO: 680 - RNA, 20 nt, synthetic construct
  misc_feature 1..20: note = Description of Artificial Sequence: Synthetic oligonucleotide
  source 1..20: mol_type = other RNA
tatatgtacatgctggttgt

SEQ ID NO: 681 - RNA, 20 nt, synthetic construct
  misc_feature 1..20: note = Description of Artificial Sequence: Synthetic oligonucleotide
  source 1..20: mol_type = other RNA
aattaagtatatgtacatgc

SEQ ID NO: 682 - RNA, 20 nt, synthetic construct
  misc_feature 1..20: note = Description of Artificial Sequence: Synthetic oligonucleotide
  source 1..20: mol_type = other RNA
ctttaaaatgagtagattga

SEQ ID NO: 683 - RNA, 20 nt, synthetic construct
  misc_feature 1..20: note = Description of Artificial Sequence: Synthetic oligonucleotide
  source 1..20: mol_type = other RNA
aacccccaactacacattaa

SEQ ID NO: 684 - RNA, 20 nt, synthetic construct
  misc_feature 1..20: note = Description of Artificial Sequence: Synthetic oligonucleotide
  source 1..20: mol_type = other RNA
taacccccaactacacatta

SEQ ID NO: 685 - RNA, 20 nt, synthetic construct
  misc_feature 1..20: note = Description of Artificial Sequence: Synthetic oligonucleotide
  source 1..20: mol_type = other RNA
ctcaattatactaaatataa

SEQ ID NO: 686 - RNA, 20 nt, synthetic construct
  misc_feature 1..20: note = Description of Artificial Sequence: Synthetic oligonucleotide
  source 1..20: mol_type = other RNA
gctcctagatgggtataaaa

SEQ ID NO: 687 - RNA, 20 nt, synthetic construct
  misc_feature 1..20: note = Description of Artificial Sequence: Synthetic oligonucleotide
  source 1..20: mol_type = other RNA
attaggacctgctcctagat

SEQ ID NO: 688 - RNA, 20 nt, synthetic construct
  misc_feature 1..20: note = Description of Artificial Sequence: Synthetic oligonucleotide
  source 1..20: mol_type = other RNA
cattaggacctgctcctaga

SEQ ID NO: 689 - RNA, 20 nt, synthetic construct
  misc_feature 1..20: note = Description of Artificial Sequence: Synthetic oligonucleotide
  source 1..20: mol_type = other RNA
tctctaatagctgccacatt

SEQ ID NO: 690 - RNA, 20 nt, synthetic construct
  misc_feature 1..20: note = Description of Artificial Sequence: Synthetic oligonucleotide
  source 1..20: mol_type = other RNA
aaaattctgacatatacaaa

SEQ ID NO: 691 - RNA, 20 nt, synthetic construct
  misc_feature 1..20: note = Description of Artificial Sequence: Synthetic oligonucleotide
  source 1..20: mol_type = other RNA
actgctttgtgtgtgaaggc

SEQ ID NO: 692 - RNA, 20 nt, synthetic construct
  misc_feature 1..20: note = Description of Artificial Sequence: Synthetic oligonucleotide
  source 1..20: mol_type = other RNA
gtttactgctttgtgtgtga

SEQ ID NO: 693 - RNA, 20 nt, synthetic construct
  misc_feature 1..20: note = Description of Artificial Sequence: Synthetic oligonucleotide
  source 1..20: mol_type = other RNA
aatagcacagtgtgtagtgt

SEQ ID NO: 694 - RNA, 20 nt, synthetic construct
  misc_feature 1..20: note = Description of Artificial Sequence: Synthetic oligonucleotide
  source 1..20: mol_type = other RNA
tgtcaaatattgtgactctc

SEQ ID NO: 695 - RNA, 20 nt, synthetic construct
  misc_feature 1..20: note = Description of Artificial Sequence: Synthetic oligonucleotide
  source 1..20: mol_type = other RNA
tctggcatccatcgcaaagt

SEQ ID NO: 696 - RNA, 20 nt, synthetic construct
  misc_feature 1..20: note = Description of Artificial Sequence: Synthetic oligonucleotide
  source 1..20: mol_type = other RNA
ttctggcatccatcgcaaag

SEQ ID NO: 697 - RNA, 20 nt, synthetic construct
  misc_feature 1..20: note = Description of Artificial Sequence: Synthetic oligonucleotide
  source 1..20: mol_type = other RNA
ctgttcatgcctgggttttc

SEQ ID NO: 698 - RNA, 20 nt, synthetic construct
  misc_feature 1..20: note = Description of Artificial Sequence: Synthetic oligonucleotide
  source 1..20: mol_type = other RNA
gccgattcctgttcatgcct

SEQ ID NO: 699 - RNA, 20 nt, synthetic construct
  misc_feature 1..20: note = Description of Artificial Sequence: Synthetic oligonucleotide
  source 1..20: mol_type = other RNA
ggccgattcctgttcatgcc

SEQ ID NO: 700 - RNA, 20 nt, synthetic construct
  misc_feature 1..20: note = Description of Artificial Sequence: Synthetic oligonucleotide
  source 1..20: mol_type = other RNA
cttgtggctggcagcctggc

SEQ ID NO: 701 - RNA, 20 nt, synthetic construct
  misc_feature 1..20: note = Description of Artificial Sequence: Synthetic oligonucleotide
  source 1..20: mol_type = other RNA
gtaccttgtggctggcagcc

SEQ ID NO: 702 - RNA, 20 nt, synthetic construct
  misc_feature 1..20: note = Description of Artificial Sequence: Synthetic oligonucleotide
  source 1..20: mol_type = other RNA
ctgtgccagtaccttgtggc

SEQ ID NO: 703 - RNA, 20 nt, synthetic construct
  misc_feature 1..20: note = Description of Artificial Sequence: Synthetic oligonucleotide
  source 1..20: mol_type = other RNA
gagcctgtgccagtaccttg

SEQ ID NO: 704 - RNA, 20 nt, synthetic construct
  misc_feature 1..20: note = Description of Artificial Sequence: Synthetic oligonucleotide
  source 1..20: mol_type = other RNA
gccagagtgggacctctcgt

SEQ ID NO: 705 - RNA, 20 nt, synthetic construct
  misc_feature 1..20: note = Description of Artificial Sequence: Synthetic oligonucleotide
  source 1..20: mol_type = other RNA
tcaggtgggaaagccagagt

SEQ ID NO: 706 - RNA, 20 nt, synthetic construct
  misc_feature 1..20: note = Description of Artificial Sequence: Synthetic oligonucleotide
  source 1..20: mol_type = other RNA
atcaggtgggaaagccagag

SEQ ID NO: 707 - RNA, 20 nt, synthetic construct
  misc_feature 1..20: note = Description of Artificial Sequence: Synthetic oligonucleotide
  source 1..20: mol_type = other RNA
ttgacactttattatcaggt

SEQ ID NO: 708 - RNA, 20 nt, synthetic construct
  misc_feature 1..20: note = Description of Artificial Sequence: Synthetic oligonucleotide
  source 1..20: mol_type = other RNA
tttgacactttattatcagg

SEQ ID NO: 709 - RNA, 20 nt, synthetic construct
  misc_feature 1..20: note = Description of Artificial Sequence: Synthetic oligonucleotide
  source 1..20: mol_type = other RNA
tgctttgacactttattatc

SEQ ID NO: 710 - RNA, 20 nt, synthetic construct
  misc_feature 1..20: note = Description of Artificial Sequence: Synthetic oligonucleotide
  source 1..20: mol_type = other RNA
actaggtgaatttaattcag

SEQ ID NO: 711 - RNA, 20 nt, synthetic construct
  misc_feature 1..20: note = Description of Artificial Sequence: Synthetic oligonucleotide
  source 1..20: mol_type = other RNA
aagtactcatttgcaacact

SEQ ID NO: 712 - RNA, 20 nt, synthetic construct
  misc_feature 1..20: note = Description of Artificial Sequence: Synthetic oligonucleotide
  source 1..20: mol_type = other RNA
tcacacttgctctcttttta

SEQ ID NO: 713 - RNA, 20 nt, synthetic construct
  misc_feature 1..20: note = Description of Artificial Sequence: Synthetic oligonucleotide
  source 1..20: mol_type = other RNA
atagcgaaaaaaaaaaaaaa

SEQ ID NO: 714 - RNA, 20 nt, synthetic construct
  misc_feature 1..20: note = Description of Artificial Sequence: Synthetic oligonucleotide
  source 1..20: mol_type = other RNA
tcttctacatgcaggagtaa

SEQ ID NO: 715 - RNA, 20 nt, synthetic construct
  misc_feature 1..20: note = Description of Artificial Sequence: Synthetic oligonucleotide
  source 1..20: mol_type = other RNA
cataagagtcttctacatgc

SEQ ID NO: 716 - RNA, 20 nt, synthetic construct
  misc_feature 1..20: note = Description of Artificial Sequence: Synthetic oligonucleotide
  source 1..20: mol_type = other RNA
gctgtataaatttatatgaa

SEQ ID NO: 717 - RNA, 20 nt, synthetic construct
  misc_feature 1..20: note = Description of Artificial Sequence: Synthetic oligonucleotide
  source 1..20: mol_type = other RNA
ctgcctacctcttaatgaaa

SEQ ID NO: 718 - RNA, 20 nt, synthetic construct
  misc_feature 1..20: note = Description of Artificial Sequence: Synthetic oligonucleotide
  source 1..20: mol_type = other RNA
agaaatgaataatttggaaa

SEQ ID NO: 719 - RNA, 20 nt, synthetic construct
  misc_feature 1..20: note = Description of Artificial Sequence: Synthetic oligonucleotide
  source 1..20: mol_type = other RNA
taatttagaaatgaataatt

SEQ ID NO: 720 - RNA, 20 nt, synthetic construct
  misc_feature 1..20: note = Description of Artificial Sequence: Synthetic oligonucleotide
  source 1..20: mol_type = other RNA
ggaaattcactatttctgcc

SEQ ID NO: 721 - RNA, 20 nt, synthetic construct
  misc_feature 1..20: note = Description of Artificial Sequence: Synthetic oligonucleotide
  source 1..20: mol_type = other RNA
gttgttttttttggcactta

SEQ ID NO: 722 - RNA, 20 nt, synthetic construct
  misc_feature 1..20: note = Description of Artificial Sequence: Synthetic oligonucleotide
  source 1..20: mol_type = other RNA
tgttgttttttttggcactt

SEQ ID NO: 723 - RNA, 20 nt, synthetic construct
  misc_feature 1..20: note = Description of Artificial Sequence: Synthetic oligonucleotide
  source 1..20: mol_type = other RNA
tgtttttttgttgttttttt

SEQ ID NO: 724 - RNA, 20 nt, synthetic construct
  misc_feature 1..20: note = Description of Artificial Sequence: Synthetic oligonucleotide
  source 1..20: mol_type = other RNA
atccagccacatggaaaata

SEQ ID NO: 725 - RNA, 20 nt, synthetic construct
  misc_feature 1..20: note = Description of Artificial Sequence: Synthetic oligonucleotide
  source 1..20: mol_type = other RNA
atagttagtatccagccaca

SEQ ID NO: 726 - RNA, 20 nt, synthetic construct
  misc_feature 1..20: note = Description of Artificial Sequence: Synthetic oligonucleotide
  source 1..20: mol_type = other RNA
cacaatttagaaaaggaggc

SEQ ID NO: 727 - RNA, 20 nt, synthetic construct
  misc_feature 1..20: note = Description of Artificial Sequence: Synthetic oligonucleotide
  source 1..20: mol_type = other RNA
gtctcacaatttagaaaagg

SEQ ID NO: 728 - RNA, 20 nt, synthetic construct
  misc_feature 1..20: note = Description of Artificial Sequence: Synthetic oligonucleotide
  source 1..20: mol_type = other RNA
aatgtctcacaatttagaaa

SEQ ID NO: 729 - RNA, 20 nt, synthetic construct
  misc_feature 1..20: note = Description of Artificial Sequence: Synthetic oligonucleotide
  source 1..20: mol_type = other RNA
tttagctattttaaaacttg

SEQ ID NO: 730 - RNA, 20 nt, synthetic construct
  misc_feature 1..20: note = Description of Artificial Sequence: Synthetic oligonucleotide
  source 1..20: mol_type = other RNA
atttagctattttaaaactt

SEQ ID NO: 731 - RNA, 20 nt, synthetic construct
  misc_feature 1..20: note = Description of Artificial Sequence: Synthetic oligonucleotide
  source 1..20: mol_type = other RNA
aatttagctattttaaaact

SEQ ID NO: 732 - RNA, 20 nt, synthetic construct
  misc_feature 1..20: note = Description of Artificial Sequence: Synthetic oligonucleotide
  source 1..20: mol_type = other RNA
tttcacaaagcacaaaattc

SEQ ID NO: 733 - RNA, 20 nt, synthetic construct
  misc_feature 1..20: note = Description of Artificial Sequence: Synthetic oligonucleotide
  source 1..20: mol_type = other RNA
aattacatgtgggtgaaaat

SEQ ID NO: 734 - RNA, 20 nt, synthetic construct
  misc_feature 1..20: note = Description of Artificial Sequence: Synthetic oligonucleotide
  source 1..20: mol_type = other RNA
aaattacatgtgggtgaaaa

SEQ ID NO: 735 - RNA, 20 nt, synthetic construct
  misc_feature 1..20: note = Description of Artificial Sequence: Synthetic oligonucleotide
  source 1..20: mol_type = other RNA
ctattttgtaaattacatgt

SEQ ID NO: 736 - RNA, 20 nt, synthetic construct
  misc_feature 1..20: note = Description of Artificial Sequence: Synthetic oligonucleotide
  source 1..20: mol_type = other RNA
actattttgtaaattacatg

SEQ ID NO: 737 - RNA, 20 nt, synthetic construct
  misc_feature 1..20: note = Description of Artificial Sequence: Synthetic oligonucleotide
  source 1..20: mol_type = other RNA
acgccaagcaaactggataa

SEQ ID NO: 738 - RNA, 20 nt, synthetic construct
  misc_feature 1..20: note = Description of Artificial Sequence: Synthetic oligonucleotide
  source 1..20: mol_type = other RNA
caggtctacgccaagcaaac

SEQ ID NO: 739 - RNA, 20 nt, synthetic construct
  misc_feature 1..20: note = Description of Artificial Sequence: Synthetic oligonucleotide
  source 1..20: mol_type = other RNA
cggtttattattttttaaac

SEQ ID NO: 740 - RNA, 20 nt, synthetic construct
  misc_feature 1..20: note = Description of Artificial Sequence: Synthetic oligonucleotide
  source 1..20: mol_type = other RNA
accacatcctgagaaatgaa

SEQ ID NO: 741 - RNA, 20 nt, synthetic construct
  misc_feature 1..20: note = Description of Artificial Sequence: Synthetic oligonucleotide
  source 1..20: mol_type = other RNA
ctgtgggtttctttaaggtt

SEQ ID NO: 742 - RNA, 20 nt, synthetic construct
  misc_feature 1..20: note = Description of Artificial Sequence: Synthetic oligonucleotide
  source 1..20: mol_type = other RNA
ttctttaaggtttggacaga

SEQ ID NO: 743 - RNA, 20 nt, synthetic construct
  misc_feature 1..20: note = Description of Artificial Sequence: Synthetic oligonucleotide
  source 1..20: mol_type = other RNA
tctttaaggtttggacagaa

SEQ ID NO: 744 - RNA, 20 nt, synthetic construct
  misc_feature 1..20: note = Description of Artificial Sequence: Synthetic oligonucleotide
  source 1..20: mol_type = other RNA
gacagaagggtaaagctatt

SEQ ID NO: 745 - RNA, 20 nt, synthetic construct
  misc_feature 1..20: note = Description of Artificial Sequence: Synthetic oligonucleotide
  source 1..20: mol_type = other RNA
attgaaagagtcatctatac

SEQ ID NO: 746 - RNA, 20 nt, synthetic construct
  misc_feature 1..20: note = Description of Artificial Sequence: Synthetic oligonucleotide
  source 1..20: mol_type = other RNA
gtcatctatactggtaaaga

SEQ ID NO: 747 - RNA, 20 nt, synthetic construct
  misc_feature 1..20: note = Description of Artificial Sequence: Synthetic oligonucleotide
  source 1..20: mol_type = other RNA
taaagaaggcaaaagttctc

SEQ ID NO: 748 - RNA, 20 nt, synthetic construct
  misc_feature 1..20: note = Description of Artificial Sequence: Synthetic oligonucleotide
  source 1..20: mol_type = other RNA
aaagaaggcaaaagttctca

SEQ ID NO: 749 - RNA, 20 nt, synthetic construct
  misc_feature 1..20: note = Description of Artificial Sequence: Synthetic oligonucleotide
  source 1..20: mol_type = other RNA
agggatgtcctattgctaag

SEQ ID NO: 750 - RNA, 20 nt, synthetic construct
  misc_feature 1..20: note = Description of Artificial Sequence: Synthetic oligonucleotide
  source 1..20: mol_type = other RNA
gggatgtcctattgctaagt

SEQ ID NO: 751 - RNA, 20 nt, synthetic construct
  misc_feature 1..20: note = Description of Artificial Sequence: Synthetic oligonucleotide
  source 1..20: mol_type = other RNA
acacttacccacttagcaat

SEQ ID NO: 752 - RNA, 20 nt, synthetic construct
  misc_feature 1..20: note = Description of Artificial Sequence: Synthetic oligonucleotide
  source 1..20: mol_type = other RNA
ggaatggtgatccacgcagg

SEQ ID NO: 753 - RNA, 20 nt, synthetic construct
  misc_feature 1..20: note = Description of Artificial Sequence: Synthetic oligonucleotide
  source 1..20: mol_type = other RNA
tgaagagaagctactgtgtt

SEQ ID NO: 754 - RNA, 20 nt, synthetic construct
  misc_feature 1..20: note = Description of Artificial Sequence: Synthetic oligonucleotide
  source 1..20: mol_type = other RNA
agaagctactgtgtttggtg

SEQ ID NO: 755 - RNA, 20 nt, synthetic construct
  misc_feature 1..20: note = Description of Artificial Sequence: Synthetic oligonucleotide
  source 1..20: mol_type = other RNA
gaagctactgtgtttggtgc

SEQ ID NO: 756 - RNA, 20 nt, synthetic construct
  misc_feature 1..20: note = Description of Artificial Sequence: Synthetic oligonucleotide
  source 1..20: mol_type = other RNA
tgtttggtgcgggagcgagc

SEQ ID NO: 757 - RNA, 20 nt, synthetic construct
  misc_feature 1..20: note = Description of Artificial Sequence: Synthetic oligonucleotide
  source 1..20: mol_type = other RNA
gcgagctggccacacctgtg

SEQ ID NO: 758 - RNA, 20 nt, synthetic construct
  misc_feature 1..20: note = Description of Artificial Sequence: Synthetic oligonucleotide
  source 1..20: mol_type = other RNA
agtgattgtgattctcatcc

SEQ ID NO: 759 - RNA, 20 nt, synthetic construct
  misc_feature 1..20: note = Description of Artificial Sequence: Synthetic oligonucleotide
  source 1..20: mol_type = other RNA
ttgtgattctcatcctggtg

SEQ ID NO: 760 - RNA, 20 nt, synthetic construct
  misc_feature 1..20: note = Description of Artificial Sequence: Synthetic oligonucleotide
  source 1..20: mol_type = other RNA
tgtgattctcatcctggtgt

SEQ ID NO: 761 - RNA, 20 nt, synthetic construct
  misc_feature 1..20: note = Description of Artificial Sequence: Synthetic oligonucleotide
  source 1..20: mol_type = other RNA
attctcatcctggtgtggga

SEQ ID NO: 762 - RNA, 20 nt, synthetic construct
  misc_feature 1..20: note = Description of Artificial Sequence: Synthetic oligonucleotide
  source 1..20: mol_type = other RNA
ggaaggaatcccgctgtctc

SEQ ID NO: 763 - RNA, 20 nt, synthetic construct
  misc_feature 1..20: note = Description of Artificial Sequence: Synthetic oligonucleotide
  source 1..20: mol_type = other RNA
tctggctgacaaactctact

SEQ ID NO: 764 - RNA, 20 nt, synthetic construct
  misc_feature 1..20: note = Description of Artificial Sequence: Synthetic oligonucleotide
  source 1..20: mol_type = other RNA
cggagcttaccgagacgctg

SEQ ID NO: 765 - RNA, 20 nt, synthetic construct
  misc_feature 1..20: note = Description of Artificial Sequence: Synthetic oligonucleotide
  source 1..20: mol_type = other RNA
accgagacgctgaggaaata

SEQ ID NO: 766 - RNA, 20 nt, synthetic construct
  misc_feature 1..20: note = Description of Artificial Sequence: Synthetic oligonucleotide
  source 1..20: mol_type = other RNA
acggcacgctcaccaatcgc

SEQ ID NO: 767 - RNA, 20 nt, synthetic construct
  misc_feature 1..20: note = Description of Artificial Sequence: Synthetic oligonucleotide
  source 1..20: mol_type = other RNA
atgaagagtaagtgaagccc

SEQ ID NO: 768 - RNA, 20 nt, synthetic construct
  misc_feature 1..20: note = Description of Artificial Sequence: Synthetic oligonucleotide
  source 1..20: mol_type = other RNA
tgaagagtaagtgaagccca

SEQ ID NO: 769 - RNA, 20 nt, synthetic construct
  misc_feature 1..20: note = Description of Artificial Sequence: Synthetic oligonucleotide
  source 1..20: mol_type = other RNA
gcttctgcgaaccacctgcg

SEQ ID NO: 770 - RNA, 20 nt, synthetic construct
  misc_feature 1..20: note = Description of Artificial Sequence: Synthetic oligonucleotide
  source 1..20: mol_type = other RNA
tcactgcagcctcacaggtg

SEQ ID NO: 771 - RNA, 20 nt, synthetic construct
  misc_feature 1..20: note = Description of Artificial Sequence: Synthetic oligonucleotide
  source 1..20: mol_type = other RNA
cacaatcactgcagcctcac

SEQ ID NO: 772 - RNA, 20 nt, synthetic construct
  misc_feature 1..20: note = Description of Artificial Sequence: Synthetic oligonucleotide
  source 1..20: mol_type = other RNA
gcgggattccttcccacacc

SEQ ID NO: 773 - RNA, 20 nt, synthetic construct
  misc_feature 1..20: note = Description of Artificial Sequence: Synthetic oligonucleotide
  source 1..20: mol_type = other RNA
gtttgtcagccagagacagc

SEQ ID NO: 774 - RNA, 20 nt, synthetic construct
  misc_feature 1..20: note = Description of Artificial Sequence: Synthetic oligonucleotide
  source 1..20: mol_type = other RNA
agtttgtcagccagagacag

SEQ ID NO: 775 - RNA, 20 nt, synthetic construct
  misc_feature 1..20: note = Description of Artificial Sequence: Synthetic oligonucleotide
  source 1..20: mol_type = other RNA
gccgtatttcctcagcgtct

SEQ ID NO: 776 - RNA, 20 nt, synthetic construct
  misc_feature 1..20: note = Description of Artificial Sequence: Synthetic oligonucleotide
  source 1..20: mol_type = other RNA
attcaaggcacaccggcgat

SEQ ID NO: 777 - RNA, 20 nt, synthetic construct
  misc_feature 1..20: note = Description of Artificial Sequence: Synthetic oligonucleotide
  source 1..20: mol_type = other RNA
actcttcattcaaggcacac

SEQ ID NO: 778 - RNA, 20 nt, synthetic construct
  misc_feature 1..20: note = Description of Artificial Sequence: Synthetic oligonucleotide
  source 1..20: mol_type = other RNA
cttcacttactcttcattca

SEQ ID NO: 779 - RNA, 20 nt, synthetic construct
  misc_feature 1..20: note = Description of Artificial Sequence: Synthetic oligonucleotide
  source 1..20: mol_type = other RNA
caggagaacttgcgcctgtc

SEQ ID NO: 780 - RNA, 20 nt, synthetic construct
  misc_feature 1..20: note = Description of Artificial Sequence: Synthetic oligonucleotide
  source 1..20: mol_type = other RNA
aggagaacttgcgcctgtca

SEQ ID NO: 781 - RNA, 20 nt, synthetic construct
  misc_feature 1..20: note = Description of Artificial Sequence: Synthetic oligonucleotide
  source 1..20: mol_type = other RNA
ggagaacttgcgcctgtcag

SEQ ID NO: 782 - RNA, 20 nt, synthetic construct
  misc_feature 1..20: note = Description of Artificial Sequence: Synthetic oligonucleotide
  source 1..20: mol_type = other RNA
aacttgcgcctgtcaggggc

SEQ ID NO: 783 - RNA, 20 nt, synthetic construct
  misc_feature 1..20: note = Description of Artificial Sequence: Synthetic oligonucleotide
  source 1..20: mol_type = other RNA
gggctggatccagaaacctg

SEQ ID NO: 784 - RNA, 20 nt, synthetic construct
  misc_feature 1..20: note = Description of Artificial Sequence: Synthetic oligonucleotide
  source 1..20: mol_type = other RNA
tgtggtgcctccttctcttt

SEQ ID NO: 785 - RNA, 20 nt, synthetic construct
  misc_feature 1..20: note = Description of Artificial Sequence: Synthetic oligonucleotide
  source 1..20: mol_type = other RNA
ccttctcttttggttgttca

SEQ ID NO: 786 - RNA, 20 nt, synthetic construct
  misc_feature 1..20: note = Description of Artificial Sequence: Synthetic oligonucleotide
  source 1..20: mol_type = other RNA
tcatggagcatgtactacaa

SEQ ID NO: 787 - RNA, 20 nt, synthetic construct
  misc_feature 1..20: note = Description of Artificial Sequence: Synthetic oligonucleotide
  source 1..20: mol_type = other RNA
ttgccagaagcaagatccca

SEQ ID NO: 788 - RNA, 20 nt, synthetic construct
  misc_feature 1..20: note = Description of Artificial Sequence: Synthetic oligonucleotide
  source 1..20: mol_type = other RNA
ccaaggaagtttaagctgct

SEQ ID NO: 789 - RNA, 20 nt, synthetic construct
  misc_feature 1..20: note = Description of Artificial Sequence: Synthetic oligonucleotide
  source 1..20: mol_type = other RNA
caaggaagtttaagctgctt

SEQ ID NO: 790 - RNA, 20 nt, synthetic construct
  misc_feature 1..20: note = Description of Artificial Sequence: Synthetic oligonucleotide
  source 1..20: mol_type = other RNA
aaggaagtttaagctgcttg

SEQ ID NO: 791 - RNA, 20 nt, synthetic construct
  misc_feature 1..20: note = Description of Artificial Sequence: Synthetic oligonucleotide
  source 1..20: mol_type = other RNA
gcttggggatgacccaaaag

SEQ ID NO: 792 - RNA, 20 nt, synthetic construct
  misc_feature 1..20: note = Description of Artificial Sequence: Synthetic oligonucleotide
  source 1..20: mol_type = other RNA
ttctggatccagcccctgac

SEQ ID NO: 793 - RNA, 20 nt, synthetic construct
  misc_feature 1..20: note = Description of Artificial Sequence: Synthetic oligonucleotide
  source 1..20: mol_type = other RNA
aaggaggcaccacaggtttc

SEQ ID NO: 794 - RNA, 20 nt, synthetic construct
  misc_feature 1..20: note = Description of Artificial Sequence: Synthetic oligonucleotide
  source 1..20: mol_type = other RNA
aaaagagaaggaggcaccac

SEQ ID NO: 795 - RNA, 20 nt, synthetic construct
  misc_feature 1..20: note = Description of Artificial Sequence: Synthetic oligonucleotide
  source 1..20: mol_type = other RNA
tgaacaaccaaaagagaagg

SEQ ID NO: 796 - RNA, 20 nt, synthetic construct
  misc_feature 1..20: note = Description of Artificial Sequence: Synthetic oligonucleotide
  source 1..20: mol_type = other RNA
ccatgaacaaccaaaagaga

SEQ ID NO: 797 - RNA, 20 nt, synthetic construct
  misc_feature 1..20: note = Description of Artificial Sequence: Synthetic oligonucleotide
  source 1..20: mol_type = other RNA
cttccttgggatcttgcttc

SEQ ID NO: 798 - RNA, 20 nt, synthetic construct
  misc_feature 1..20: note = Description of Artificial Sequence: Synthetic oligonucleotide
  source 1..20: mol_type = other RNA
caagcagcttaaacttcctt

SEQ ID NO: 799 - RNA, 20 nt, synthetic construct
  misc_feature 1..20: note = Description of Artificial Sequence: Synthetic oligonucleotide
  source 1..20: mol_type = other RNA
ccaagcagcttaaacttcct

SEQ ID NO: 800 - RNA, 20 nt, synthetic construct
  misc_feature 1..20: note = Description of Artificial Sequence: Synthetic oligonucleotide
  source 1..20: mol_type = other RNA
gaagtaaacaaacctctttt

SEQ ID NO: 801 - RNA, 20 nt, synthetic construct
  misc_feature 1..20: note = Description of Artificial Sequence: Synthetic oligonucleotide
  source 1..20: mol_type = other RNA
ggaagtaaacaaacctcttt

SEQ ID NO: 802 - RNA, 20 nt, synthetic construct
  misc_feature 1..20: note = Description of Artificial Sequence: Synthetic oligonucleotide
  source 1..20: mol_type = other RNA
ctttatacaggaagagaaac

SEQ ID NO: 803 - RNA, 20 nt, synthetic construct
  misc_feature 1..20: note = Description of Artificial Sequence: Synthetic oligonucleotide
  source 1..20: mol_type = other RNA
gcaaaacctgtccactctta

SEQ ID NO: 804 - RNA, 20 nt, synthetic construct
  misc_feature 1..20: note = Description of Artificial Sequence: Synthetic oligonucleotide
  source 1..20: mol_type = other RNA
acctgatgcatataataatc

SEQ ID NO: 805 - RNA, 20 nt, synthetic construct
  misc_feature 1..20: note = Description of Artificial Sequence: Synthetic oligonucleotide
  source 1..20: mol_type = other RNA
ttggtgccataagagtggac

SEQ ID NO: 806 - RNA, 20 nt, synthetic construct
  misc_feature 1..20: note = Description of Artificial Sequence: Synthetic oligonucleotide
  source 1..20: mol_type = other RNA
atatgttggtgccataagag

SEQ ID NO: 807 - RNA, 20 nt, synthetic construct
  misc_feature 1..20: note = Description of Artificial Sequence: Synthetic oligonucleotide
  source 1..20: mol_type = other RNA
ggtgcaagtttcttatatgt

SEQ ID NO: 808 - RNA, 20 nt, synthetic construct
  misc_feature 1..20: note = Description of Artificial Sequence: Synthetic oligonucleotide
  source 1..20: mol_type = other RNA
acctgattattatatgcatc

SEQ ID NO: 809 - RNA, 20 nt, synthetic construct
  misc_feature 1..20: note = Description of Artificial Sequence: Synthetic oligonucleotide
  source 1..20: mol_type = other RNA
cagagcaccagagtgccgtc

SEQ ID NO: 810 - RNA, 20 nt, synthetic construct
  misc_feature 1..20: note = Description of Artificial Sequence: Synthetic oligonucleotide
  source 1..20: mol_type = other RNA
agagcaccagagtgccgtct

SEQ ID NO: 811 - RNA, 20 nt, synthetic construct
  misc_feature 1..20: note = Description of Artificial Sequence: Synthetic oligonucleotide
  source 1..20: mol_type = other RNA
agagtgccgtctgggtctga

SEQ ID NO: 812 - RNA, 20 nt, synthetic construct
  misc_feature 1..20: note = Description of Artificial Sequence: Synthetic oligonucleotide
  source 1..20: mol_type = other RNA
tgccgtctgggtctgaagga

SEQ ID NO: 813 - RNA, 20 nt, synthetic construct
  misc_feature 1..20: note = Description of Artificial Sequence: Synthetic oligonucleotide
  source 1..20: mol_type = other RNA
aaggaaggccgtccattctc

SEQ ID NO: 814 - RNA, 20 nt, synthetic construct
  misc_feature 1..20: note = Description of Artificial Sequence: Synthetic oligonucleotide
  source 1..20: mol_type = other RNA
aggaaggccgtccattctca

SEQ ID NO: 815 - RNA, 20 nt, synthetic construct
  misc_feature 1..20: note = Description of Artificial Sequence: Synthetic oligonucleotide
  source 1..20: mol_type = other RNA
ggaaggccgtccattctcag

SEQ ID NO: 816 - RNA, 20 nt, synthetic construct
  misc_feature 1..20: note = Description of Artificial Sequence: Synthetic oligonucleotide
  source 1..20: mol_type = other RNA
ctcaggggtcactgcatgtt

SEQ ID NO: 817 - RNA, 20 nt, synthetic construct
  misc_feature 1..20: note = Description of Artificial Sequence: Synthetic oligonucleotide
  source 1..20: mol_type = other RNA
gacttgcacaacatgcagaa

SEQ ID NO: 818 - RNA, 20 nt, synthetic construct
  misc_feature 1..20: note = Description of Artificial Sequence: Synthetic oligonucleotide
  source 1..20: mol_type = other RNA
catgcagaatggcagcacat

SEQ ID NO: 819 - RNA, 20 nt, synthetic construct
  misc_feature 1..20: note = Description of Artificial Sequence: Synthetic oligonucleotide
  source 1..20: mol_type = other RNA
atggcagcacattggtaagt

SEQ ID NO: 820 - RNA, 20 nt, synthetic construct
  misc_feature 1..20: note = Description of Artificial Sequence: Synthetic oligonucleotide
  source 1..20: mol_type = other RNA
tggcagcacattggtaagtt

SEQ ID NO: 821 - RNA, 20 nt, synthetic construct
  misc_feature 1..20: note = Description of Artificial Sequence: Synthetic oligonucleotide
  source 1..20: mol_type = other RNA
cacattggtaagttgggctg

SEQ ID NO: 822 - RNA, 20 nt, synthetic construct
  misc_feature 1..20: note = Description of Artificial Sequence: Synthetic oligonucleotide
  source 1..20: mol_type = other RNA
ttcagacccagacggcactc

SEQ ID NO: 823 - RNA, 20 nt, synthetic construct
  misc_feature 1..20: note = Description of Artificial Sequence: Synthetic oligonucleotide
  source 1..20: mol_type = other RNA
ggccttccttcagacccaga

SEQ ID NO: 824 - RNA, 20 nt, synthetic construct
  misc_feature 1..20: note = Description of Artificial Sequence: Synthetic oligonucleotide
  source 1..20: mol_type = other RNA
cagtgacccctgagaatgga

SEQ ID NO: 825 - RNA, 20 nt, synthetic construct
  misc_feature 1..20: note = Description of Artificial Sequence: Synthetic oligonucleotide
  source 1..20: mol_type = other RNA
catgcagtgacccctgagaa

SEQ ID NO: 826 - RNA, 20 nt, synthetic construct
  misc_feature 1..20: note = Description of Artificial Sequence: Synthetic oligonucleotide
  source 1..20: mol_type = other RNA
catgttgtgcaagtctctgt

SEQ ID NO: 827 - RNA, 20 nt, synthetic construct
  misc_feature 1..20: note = Description of Artificial Sequence: Synthetic oligonucleotide
  source 1..20: mol_type = other RNA
gcatgttgtgcaagtctctg

SEQ ID NO: 828 - RNA, 20 nt, synthetic construct
  misc_feature 1..20: note = Description of Artificial Sequence: Synthetic oligonucleotide
  source 1..20: mol_type = other RNA
agagaagacaatcgagaatt

SEQ ID NO: 829 - RNA, 20 nt, synthetic construct
  misc_feature 1..20: note = Description of Artificial Sequence: Synthetic oligonucleotide
  source 1..20: mol_type = other RNA
gaagacaatcgagaatttgg

SEQ ID NO: 830 - RNA, 20 nt, synthetic construct
  misc_feature 1..20: note = Description of Artificial Sequence: Synthetic oligonucleotide
  source 1..20: mol_type = other RNA
agaatttggaggaaaacctg

SEQ ID NO: 831 - RNA, 20 nt, synthetic construct
  misc_feature 1..20: note = Description of Artificial Sequence: Synthetic oligonucleotide
  source 1..20: mol_type = other RNA
tttatacaaagtctctgacg

SEQ ID NO: 832 - RNA, 20 nt, synthetic construct
  misc_feature 1..20: note = Description of Artificial Sequence: Synthetic oligonucleotide
  source 1..20: mol_type = other RNA
gtctctgacgtggatgagtt

SEQ ID NO: 833 - RNA, 20 nt, synthetic construct
  misc_feature 1..20: note = Description of Artificial Sequence: Synthetic oligonucleotide
  source 1..20: mol_type = other RNA
tctctgacgtggatgagttt

SEQ ID NO: 834 - RNA, 20 nt, synthetic construct
  misc_feature 1..20: note = Description of Artificial Sequence: Synthetic oligonucleotide
  source 1..20: mol_type = other RNA
cgtggatgagtttgggagtg

SEQ ID NO: 835 - RNA, 20 nt, synthetic construct
  misc_feature 1..20: note = Description of Artificial Sequence: Synthetic oligonucleotide
  source 1..20: mol_type = other RNA
gtttgggagtgtggaagctc

SEQ ID NO: 836 - RNA, 20 nt, synthetic construct
  misc_feature 1..20: note = Description of Artificial Sequence: Synthetic oligonucleotide
  source 1..20: mol_type = other RNA
tgggagtgtggaagctcagg

SEQ ID NO: 837 - RNA, 20 nt, synthetic construct
  misc_feature 1..20: note = Description of Artificial Sequence: Synthetic oligonucleotide
  source 1..20: mol_type = other RNA
aagctcaggaggagaaaaaa

SEQ ID NO: 838 - RNA, 20 nt, synthetic construct
  misc_feature 1..20: note = Description of Artificial Sequence: Synthetic oligonucleotide
  source 1..20: mol_type = other RNA
caggaggagaaaaaacggag

SEQ ID NO: 839 - RNA, 20 nt, synthetic construct
  misc_feature 1..20: note = Description of Artificial Sequence: Synthetic oligonucleotide
  source 1..20: mol_type = other RNA
aaaacggagtggtgccattc

SEQ ID NO: 840 - RNA, 20 nt, synthetic construct
  misc_feature 1..20: note = Description of Artificial Sequence: Synthetic oligonucleotide
  source 1..20: mol_type = other RNA
ttcaggtactgagttctttt

SEQ ID NO: 841 - RNA, 20 nt, synthetic construct
  misc_feature 1..20: note = Description of Artificial Sequence: Synthetic oligonucleotide
  source 1..20: mol_type = other RNA
gttcttttcggcgaaaagtc

SEQ ID NO: 842 - RNA, 20 nt, synthetic construct
  misc_feature 1..20: note = Description of Artificial Sequence: Synthetic oligonucleotide
  source 1..20: mol_type = other RNA
cagtcaagacttgccgacaa

SEQ ID NO: 843 - RNA, 20 nt, synthetic construct
  misc_feature 1..20: note = Description of Artificial Sequence: Synthetic oligonucleotide
  source 1..20: mol_type = other RNA
agctgaaaagctttcctccc

SEQ ID NO: 844 - RNA, 20 nt, synthetic construct
  misc_feature 1..20: note = Description of Artificial Sequence: Synthetic oligonucleotide
  source 1..20: mol_type = other RNA
cagctcaaataaaaatgaaa

SEQ ID NO: 845 - RNA, 20 nt, synthetic construct
  misc_feature 1..20: note = Description of Artificial Sequence: Synthetic oligonucleotide
  source 1..20: mol_type = other RNA
acaaactgaaaacgcaagcc

SEQ ID NO: 846 - RNA, 20 nt, synthetic construct
  misc_feature 1..20: note = Description of Artificial Sequence: Synthetic oligonucleotide
  source 1..20: mol_type = other RNA
cgcaagccaggctaaacagt

SEQ ID NO: 847 - RNA, 20 nt, synthetic construct
  misc_feature 1..20: note = Description of Artificial Sequence: Synthetic oligonucleotide
  source 1..20: mol_type = other RNA
agccaggctaaacagttggc

SEQ ID NO: 848 - RNA, 20 nt, synthetic construct
  misc_feature 1..20: note = Description of Artificial Sequence: Synthetic oligonucleotide
  source 1..20: mol_type = other RNA
gtgagagtgcatacctggta

SEQ ID NO: 849 - RNA, 20 nt, synthetic construct
  misc_feature 1..20: note = Description of Artificial Sequence: Synthetic oligonucleotide
  source 1..20: mol_type = other RNA
agtgagagtgcatacctggt

SEQ ID NO: 850 - RNA, 20 nt, synthetic construct
  misc_feature 1..20: note = Description of Artificial Sequence: Synthetic oligonucleotide
  source 1..20: mol_type = other RNA
ctctagtgagagtgcatacc

SEQ ID NO: 851 - RNA, 20 nt, synthetic construct
  misc_feature 1..20: note = Description of Artificial Sequence: Synthetic oligonucleotide
  source 1..20: mol_type = other RNA
acgtgaagctgctcatcctc

SEQ ID NO: 852 - RNA, 20 nt, synthetic construct
  misc_feature 1..20: note = Description of Artificial Sequence: Synthetic oligonucleotide
  source 1..20: mol_type = other RNA
acgtcagagactttgtataa

SEQ ID NO: 853 - RNA, 20 nt, synthetic construct
  misc_feature 1..20: note = Description of Artificial Sequence: Synthetic oligonucleotide
  source 1..20: mol_type = other RNA
aaaagaactcagtacctgaa

SEQ ID NO: 854 - RNA, 20 nt, synthetic construct
  misc_feature 1..20: note = Description of Artificial Sequence: Synthetic oligonucleotide
  source 1..20: mol_type = other RNA
ctttgtcggcaagtcttgac

SEQ ID NO: 855 - RNA, 20 nt, synthetic construct
  misc_feature 1..20: note = Description of Artificial Sequence: Synthetic oligonucleotide
  source 1..20: mol_type = other RNA
tggcttctagtttcctttgt

SEQ ID NO: 856 - RNA, 20 nt, synthetic construct
  misc_feature 1..20: note = Description of Artificial Sequence: Synthetic oligonucleotide
  source 1..20: mol_type = other RNA
cttttcagctgcagctttct

SEQ ID NO: 857 - RNA, 20 nt, synthetic construct
  misc_feature 1..20: note = Description of Artificial Sequence: Synthetic oligonucleotide
  source 1..20: mol_type = other RNA
atttgagctgttctccaggg

SEQ ID NO: 858 - RNA, 20 nt, synthetic construct
  misc_feature 1..20: note = Description of Artificial Sequence: Synthetic oligonucleotide
  source 1..20: mol_type = other RNA
tttatttgagctgttctcca

SEQ ID NO: 859 - RNA, 20 nt, synthetic construct
  misc_feature 1..20: note = Description of Artificial Sequence: Synthetic oligonucleotide
  source 1..20: mol_type = other RNA
ttttatttgagctgttctcc

SEQ ID NO: 860 - RNA, 20 nt, synthetic construct
  misc_feature 1..20: note = Description of Artificial Sequence: Synthetic oligonucleotide
  source 1..20: mol_type = other RNA
agtttgttttgtacgtgatg

SEQ ID NO: 861 - RNA, 20 nt, synthetic construct
  misc_feature 1..20: note = Description of Artificial Sequence: Synthetic oligonucleotide
  source 1..20: mol_type = other RNA
cagtttgttttgtacgtgat

SEQ ID NO: 862 - RNA, 20 nt, synthetic construct
  misc_feature 1..20: note = Description of Artificial Sequence: Synthetic oligonucleotide
  source 1..20: mol_type = other RNA
tcagtttgttttgtacgtga

SEQ ID NO: 863 - RNA, 20 nt, synthetic construct
  misc_feature 1..20: note = Description of Artificial Sequence: Synthetic oligonucleotide
  source 1..20: mol_type = other RNA
tacctgccaactgtttagcc

SEQ ID NO: 864 - RNA, 20 nt, synthetic construct
  misc_feature 1..20: note = Description of Artificial Sequence: Synthetic oligonucleotide
  source 1..20: mol_type = other RNA
gtcaactcttattctgcttc

SEQ ID NO: 865 - RNA, 20 nt, synthetic construct
  misc_feature 1..20: note = Description of Artificial Sequence: Synthetic oligonucleotide
  source 1..20: mol_type = other RNA
ccaccaatccatacatgaga

SEQ ID NO: 866 - RNA, 20 nt, synthetic construct
  misc_feature 1..20: note = Description of Artificial Sequence: Synthetic oligonucleotide
  source 1..20: mol_type = other RNA
tcacacacttcagatatcta

SEQ ID NO: 867 - RNA, 20 nt, synthetic construct
  misc_feature 1..20: note = Description of Artificial Sequence: Synthetic oligonucleotide
  source 1..20: mol_type = other RNA
tccacctcatctcaagctgc

SEQ ID NO: 868 - RNA, 20 nt, synthetic construct
  misc_feature 1..20: note = Description of Artificial Sequence: Synthetic oligonucleotide
  source 1..20: mol_type = other RNA
aatcccatgaacccttaccc

SEQ ID NO: 869 - RNA, 20 nt, synthetic construct
  misc_feature 1..20: note = Description of Artificial Sequence: Synthetic oligonucleotide
  source 1..20: mol_type = other RNA
atcccatgaacccttaccct

SEQ ID NO: 870 - RNA, 20 nt, synthetic construct
  misc_feature 1..20: note = Description of Artificial Sequence: Synthetic oligonucleotide
  source 1..20: mol_type = other RNA
tatccatcatatcaatgcaa

SEQ ID NO: 871 - RNA, 20 nt, synthetic construct
  misc_feature 1..20: note = Description of Artificial Sequence: Synthetic oligonucleotide
  source 1..20: mol_type = other RNA
atgcaatggaaacctatcag

SEQ ID NO: 872 - RNA, 20 nt, synthetic construct
  misc_feature 1..20: note = Description of Artificial Sequence: Synthetic oligonucleotide
  source 1..20: mol_type = other RNA
ggacaactgctccccatatc

SEQ ID NO: 873 - RNA, 20 nt, synthetic construct
  misc_feature 1..20: note = Description of Artificial Sequence: Synthetic oligonucleotide
  source 1..20: mol_type = other RNA
gacaactgctccccatatct

SEQ ID NO: 874 - RNA, 20 nt, synthetic construct
  misc_feature 1..20: note = Description of Artificial Sequence: Synthetic oligonucleotide
  source 1..20: mol_type = other RNA
ttctccccagtctcagccga

SEQ ID NO: 875 - RNA, 20 nt, synthetic construct
  misc_feature 1..20: note = Description of Artificial Sequence: Synthetic oligonucleotide
  source 1..20: mol_type = other RNA
ctcagccgatggatctgtat

SEQ ID NO: 876 - RNA, 20 nt, synthetic construct
  misc_feature 1..20: note = Description of Artificial Sequence: Synthetic oligonucleotide
  source 1..20: mol_type = other RNA
tccatacactttaccagcca

SEQ ID NO: 877 - RNA, 20 nt, synthetic construct
  misc_feature 1..20: note = Description of Artificial Sequence: Synthetic oligonucleotide
  source 1..20: mol_type = other RNA
acactttaccagccaaggtt

SEQ ID NO: 878 - RNA, 20 nt, synthetic construct
  misc_feature 1..20: note = Description of Artificial Sequence: Synthetic oligonucleotide
  source 1..20: mol_type = other RNA
agttttacatctaaatactt

SEQ ID NO: 879 - RNA, 20 nt, synthetic construct
  misc_feature 1..20: note = Description of Artificial Sequence: Synthetic oligonucleotide
  source 1..20: mol_type = other RNA
acatctaaatacttaggtta

SEQ ID NO: 880 - RNA, 20 nt, synthetic construct
  misc_feature 1..20: note = Description of Artificial Sequence: Synthetic oligonucleotide
  source 1..20: mol_type = other RNA
ttatggaaaccaaaatatgc

SEQ ID NO: 881 - RNA, 20 nt, synthetic construct
  misc_feature 1..20: note = Description of Artificial Sequence: Synthetic oligonucleotide
  source 1..20: mol_type = other RNA
tatggaaaccaaaatatgca

SEQ ID NO: 882 - RNA, 20 nt, synthetic construct
  misc_feature 1..20: note = Description of Artificial Sequence: Synthetic oligonucleotide
  source 1..20: mol_type = other RNA
aaccaaaatatgcagggaga

SEQ ID NO: 883 - RNA, 20 nt, synthetic construct
  misc_feature 1..20: note = Description of Artificial Sequence: Synthetic oligonucleotide
  source 1..20: mol_type = other RNA
agaccaaatgtacatcatgt

SEQ ID NO: 884 - RNA, 20 nt, synthetic construct
  misc_feature 1..20: note = Description of Artificial Sequence: Synthetic oligonucleotide
  source 1..20: mol_type = other RNA
gaccaaatgtacatcatgta

SEQ ID NO: 885 - RNA, 20 nt, synthetic construct
  misc_feature 1..20: note = Description of Artificial Sequence: Synthetic oligonucleotide
  source 1..20: mol_type = other RNA
tccttatcccactcatgaga

SEQ ID NO: 886 - RNA, 20 nt, synthetic construct
  misc_feature 1..20: note = Description of Artificial Sequence: Synthetic oligonucleotide
  source 1..20: mol_type = other RNA
tatcccactcatgagatgga

SEQ ID NO: 887 - RNA, 20 nt, synthetic construct
  misc_feature 1..20: note = Description of Artificial Sequence: Synthetic oligonucleotide
  source 1..20: mol_type = other RNA
tgagatggatggccacttca

SEQ ID NO: 888 - RNA, 20 nt, synthetic construct
  misc_feature 1..20: note = Description of Artificial Sequence: Synthetic oligonucleotide
  source 1..20: mol_type = other RNA
gagatggatggccacttcat

SEQ ID NO: 889 - RNA, 20 nt, synthetic construct
  misc_feature 1..20: note = Description of Artificial Sequence: Synthetic oligonucleotide
  source 1..20: mol_type = other RNA
caatctgagcaatccaaaca

SEQ ID NO: 890 - RNA, 20 nt, synthetic construct
  misc_feature 1..20: note = Description of Artificial Sequence: Synthetic oligonucleotide
  source 1..20: mol_type = other RNA
ccaaacatggactataaaaa

SEQ ID NO: 891 - RNA, 20 nt, synthetic construct
  misc_feature 1..20: note = Description of Artificial Sequence: Synthetic oligonucleotide
  source 1..20: mol_type = other RNA
ccataactacagtgcagctc

SEQ ID NO: 892 - RNA, 20 nt, synthetic construct
  misc_feature 1..20: note = Description of Artificial Sequence: Synthetic oligonucleotide
  source 1..20: mol_type = other RNA
cataactacagtgcagctcc

SEQ ID NO: 893 - RNA, 20 nt, synthetic construct
  misc_feature 1..20: note = Description of Artificial Sequence: Synthetic oligonucleotide
  source 1..20: mol_type = other RNA
tgccctgcatctccaaaaca

SEQ ID NO: 894 - RNA, 20 nt, synthetic construct
  misc_feature 1..20: note = Description of Artificial Sequence: Synthetic oligonucleotide
  source 1..20: mol_type = other RNA
atgctttcccacacagctaa

SEQ ID NO: 895 - RNA, 20 nt, synthetic construct
  misc_feature 1..20: note = Description of Artificial Sequence: Synthetic oligonucleotide
  source 1..20: mol_type = other RNA
tgctttcccacacagctaat

SEQ ID NO: 896 - RNA, 20 nt, synthetic construct
  misc_feature 1..20: note = Description of Artificial Sequence: Synthetic oligonucleotide
  source 1..20: mol_type = other RNA
gatagaactgcttgtgtcca

SEQ ID NO: 897 - RNA, 20 nt, synthetic construct
  misc_feature 1..20: note = Description of Artificial Sequence: Synthetic oligonucleotide
  source 1..20: mol_type = other RNA
agaactgcttgtgtccaagg

SEQ ID NO: 898 - RNA, 20 nt, synthetic construct
  misc_feature 1..20: note = Description of Artificial Sequence: Synthetic oligonucleotide
  source 1..20: mol_type = other RNA
cacaaattaagtgatgctaa

SEQ ID NO: 899 - RNA, 20 nt, synthetic construct
  misc_feature 1..20: note = Description of Artificial Sequence: Synthetic oligonucleotide
  source 1..20: mol_type = other RNA
attaagtgatgctaatggtc

SEQ ID NO: 900 - RNA, 20 nt, synthetic construct
  misc_feature 1..20: note = Description of Artificial Sequence: Synthetic oligonucleotide
  source 1..20: mol_type = other RNA
tggtcaggaaaagcagccat

SEQ ID NO: 901 - RNA, 20 nt, synthetic construct
  misc_feature 1..20: note = Description of Artificial Sequence: Synthetic oligonucleotide
  source 1..20: mol_type = other RNA
gcagccattggcactagtcc

SEQ ID NO: 902 - RNA, 20 nt, synthetic construct
  misc_feature 1..20: note = Description of Artificial Sequence: Synthetic oligonucleotide
  source 1..20: mol_type = other RNA
cagccattggcactagtcca

SEQ ID NO: 903 - RNA, 20 nt, synthetic construct
  misc_feature 1..20: note = Description of Artificial Sequence: Synthetic oligonucleotide
  source 1..20: mol_type = other RNA
attggcactagtccagggtg

SEQ ID NO: 904 - RNA, 20 nt, synthetic construct
  misc_feature 1..20: note = Description of Artificial Sequence: Synthetic oligonucleotide
  source 1..20: mol_type = other RNA
ctagtccagggtgtggcttc

SEQ ID NO: 905 - RNA, 20 nt, synthetic construct
  misc_feature 1..20: note = Description of Artificial Sequence: Synthetic oligonucleotide
  source 1..20: mol_type = other RNA
gggtgtggcttctggtgcag

SEQ ID NO: 906 - RNA, 20 nt, synthetic construct
  misc_feature 1..20: note = Description of Artificial Sequence: Synthetic oligonucleotide
  source 1..20: mol_type = other RNA
tggtgcagaggacaacgatg

SEQ ID NO: 907 - RNA, 20 nt, synthetic construct
  misc_feature 1..20: note = Description of Artificial Sequence: Synthetic oligonucleotide
  source 1..20: mol_type = other RNA
cagaggacaacgatgaggtc

SEQ ID NO: 908 - RNA, 20 nt, synthetic construct
  misc_feature 1..20: note = Description of Artificial Sequence: Synthetic oligonucleotide
  source 1..20: mol_type = other RNA
agacagcgagcagagctttc

SEQ ID NO: 909 - RNA, 20 nt, synthetic construct
  misc_feature 1..20: note = Description of Artificial Sequence: Synthetic oligonucleotide
  source 1..20: mol_type = other RNA
agctttctggatcctgacat

SEQ ID NO: 910 - RNA, 20 nt, synthetic construct
  misc_feature 1..20: note = Description of Artificial Sequence: Synthetic oligonucleotide
  source 1..20: mol_type = other RNA
gctttctggatcctgacatt

SEQ ID NO: 911 - RNA, 20 nt, synthetic construct
  misc_feature 1..20: note = Description of Artificial Sequence: Synthetic oligonucleotide
  source 1..20: mol_type = other RNA
ctttctggatcctgacattg

SEQ ID NO: 912 - RNA, 20 nt, synthetic construct
  misc_feature 1..20: note = Description of Artificial Sequence: Synthetic oligonucleotide
  source 1..20: mol_type = other RNA
tttctggatcctgacattgg

SEQ ID NO: 913 - RNA, 20 nt, synthetic construct
  misc_feature 1..20: note = Description of Artificial Sequence: Synthetic oligonucleotide
  source 1..20: mol_type = other RNA
ggatcctgacattgggggag

SEQ ID NO: 914 - RNA, 20 nt, synthetic construct
  misc_feature 1..20: note = Description of Artificial Sequence: Synthetic oligonucleotide
  source 1..20: mol_type = other RNA
tgacattgggggagtggccg

SEQ ID NO: 915 - RNA, 20 nt, synthetic construct
  misc_feature 1..20: note = Description of Artificial Sequence: Synthetic oligonucleotide
  source 1..20: mol_type = other RNA
gtggccgtggctccaactca

SEQ ID NO: 916 - RNA, 20 nt, synthetic construct
  misc_feature 1..20: note = Description of Artificial Sequence: Synthetic oligonucleotide
  source 1..20: mol_type = other RNA
tggccgtggctccaactcat

SEQ ID NO: 917 - RNA, 20 nt, synthetic construct
  misc_feature 1..20: note = Description of Artificial Sequence: Synthetic oligonucleotide
  source 1..20: mol_type = other RNA
cccctttaaagaatcccaat

SEQ ID NO: 918 - RNA, 20 nt, synthetic construct
  misc_feature 1..20: note = Description of Artificial Sequence: Synthetic oligonucleotide
  source 1..20: mol_type = other RNA
ccaataggaatcaccccacc

SEQ ID NO: 919 - RNA, 20 nt, synthetic construct
  misc_feature 1..20: note = Description of Artificial Sequence: Synthetic oligonucleotide
  source 1..20: mol_type = other RNA
agcatgaatgagccaaaaca

SEQ ID NO: 920 - RNA, 20 nt, synthetic construct
  misc_feature 1..20: note = Description of Artificial Sequence: Synthetic oligonucleotide
  source 1..20: mol_type = other RNA
gaatgagccaaaacatggct

SEQ ID NO: 921 - RNA, 20 nt, synthetic construct
  misc_feature 1..20: note = Description of Artificial Sequence: Synthetic oligonucleotide
  source 1..20: mol_type = other RNA
caaaacatggcttggctctt

SEQ ID NO: 922 - RNA, 20 nt, synthetic construct
  misc_feature 1..20: note = Description of Artificial Sequence: Synthetic oligonucleotide
  source 1..20: mol_type = other RNA
aaaacatggcttggctcttt

SEQ ID NO: 923 - RNA, 20 nt, synthetic construct
  misc_feature 1..20: note = Description of Artificial Sequence: Synthetic oligonucleotide
  source 1..20: mol_type = other RNA
ggctctttgggaagccaaaa

SEQ ID NO: 924 - RNA, 20 nt, synthetic construct
  misc_feature 1..20: note = Description of Artificial Sequence: Synthetic oligonucleotide
  source 1..20: mol_type = other RNA
tgaaaaagcccgtgagaaag

SEQ ID NO: 925 - RNA, 20 nt, synthetic construct
  misc_feature 1..20: note = Description of Artificial Sequence: Synthetic oligonucleotide
  source 1..20: mol_type = other RNA
gaggaagagtgtgaaaagta

SEQ ID NO: 926 - RNA, 20 nt, synthetic construct
  misc_feature 1..20: note = Description of Artificial Sequence: Synthetic oligonucleotide
  source 1..20: mol_type = other RNA
tatgtgcctcagaaatccca

SEQ ID NO: 927 - RNA, 20 nt, synthetic construct
  misc_feature 1..20: note = Description of Artificial Sequence: Synthetic oligonucleotide
  source 1..20: mol_type = other RNA
cccatggcaaaaaagtgaaa

SEQ ID NO: 928 - RNA, 20 nt, synthetic construct
  misc_feature 1..20: note = Description of Artificial Sequence: Synthetic oligonucleotide
  source 1..20: mol_type = other RNA
ccatggcaaaaaagtgaaac

SEQ ID NO: 929 - RNA, 20 nt, synthetic construct
  misc_feature 1..20: note = Description of Artificial Sequence: Synthetic oligonucleotide
  source 1..20: mol_type = other RNA
tcatcaagtctcttgccgaa

SEQ ID NO: 930 - RNA, 20 nt, synthetic construct
  misc_feature 1..20: note = Description of Artificial Sequence: Synthetic oligonucleotide
  source 1..20: mol_type = other RNA
catctccatatgccttcact

SEQ ID NO: 931 - RNA, 20 nt, synthetic construct
  misc_feature 1..20: note = Description of Artificial Sequence: Synthetic oligonucleotide
  source 1..20: mol_type = other RNA
atctccatatgccttcactc

SEQ ID NO: 932 - RNA, 20 nt, synthetic construct
  misc_feature 1..20: note = Description of Artificial Sequence: Synthetic oligonucleotide
  source 1..20: mol_type = other RNA
tatgccttcactcgggtcac

SEQ ID NO: 933 - RNA, 20 nt, synthetic construct
  misc_feature 1..20: note = Description of Artificial Sequence: Synthetic oligonucleotide
  source 1..20: mol_type = other RNA
atgccttcactcgggtcaca

SEQ ID NO: 934 - RNA, 20 nt, synthetic construct
  misc_feature 1..20: note = Description of Artificial Sequence: Synthetic oligonucleotide
  source 1..20: mol_type = other RNA
atgatatcacccccttttgt

SEQ ID NO: 935 - RNA, 20 nt, synthetic construct
  misc_feature 1..20: note = Description of Artificial Sequence: Synthetic oligonucleotide
  source 1..20: mol_type = other RNA
gtagtatagttctcatgacg

SEQ ID NO: 936 - RNA, 20 nt, synthetic construct
  misc_feature 1..20: note = Description of Artificial Sequence: Synthetic oligonucleotide
  source 1..20: mol_type = other RNA
tagtatagttctcatgacgt

SEQ ID NO: 937 - RNA, 20 nt, synthetic construct
  misc_feature 1..20: note = Description of Artificial Sequence: Synthetic oligonucleotide
  source 1..20: mol_type = other RNA
agttctcatgacgtgggcag

SEQ ID NO: 938 - RNA, 20 nt, synthetic construct
  misc_feature 1..20: note = Description of Artificial Sequence: Synthetic oligonucleotide
  source 1..20: mol_type = other RNA
gttctcatgacgtgggcagt

SEQ ID NO: 939 - RNA, 20 nt, synthetic construct
  misc_feature 1..20: note = Description of Artificial Sequence: Synthetic oligonucleotide
  source 1..20: mol_type = other RNA
ttctcatgacgtgggcagtg

SEQ ID NO: 940 - RNA, 20 nt, synthetic construct
  misc_feature 1..20: note = Description of Artificial Sequence: Synthetic oligonucleotide
  source 1..20: mol_type = other RNA
atgacgtgggcagtggggaa

SEQ ID NO: 941 - RNA, 20 nt, synthetic construct
  misc_feature 1..20: note = Description of Artificial Sequence: Synthetic oligonucleotide
  source 1..20: mol_type = other RNA
cacagtattcatgacaaatg

SEQ ID NO: 942 - RNA, 20 nt, synthetic construct
  misc_feature 1..20: note = Description of Artificial Sequence: Synthetic oligonucleotide
  source 1..20: mol_type = other RNA
agtattcatgacaaatgtgg

SEQ ID NO: 943 - RNA, 20 nt, synthetic construct
  misc_feature 1..20: note = Description of Artificial Sequence: Synthetic oligonucleotide
  source 1..20: mol_type = other RNA
gtattcatgacaaatgtggt

SEQ ID NO: 944 - RNA, 20 nt, synthetic construct
  misc_feature 1..20: note = Description of Artificial Sequence: Synthetic oligonucleotide
  source 1..20: mol_type = other RNA
cagctcaccagcaacaaaag

SEQ ID NO: 945 - RNA, 20 nt, synthetic construct
  misc_feature 1..20: note = Description of Artificial Sequence: Synthetic oligonucleotide
  source 1..20: mol_type = other RNA
ccatagcacttaattttcac

SEQ ID NO: 946 - RNA, 20 nt, synthetic construct
  misc_feature 1..20: note = Description of Artificial Sequence: Synthetic oligonucleotide
  source 1..20: mol_type = other RNA
aattttcactggctcccaag

SEQ ID NO: 947 - RNA, 20 nt, synthetic construct
  misc_feature 1..20: note = Description of Artificial Sequence: Synthetic oligonucleotide
  source 1..20: mol_type = other RNA
ggctcccaagtggtcacaga

SEQ ID NO: 948 - RNA, 20 nt, synthetic construct
  misc_feature 1..20: note = Description of Artificial Sequence: Synthetic oligonucleotide
  source 1..20: mol_type = other RNA
agtggtcacagatggcatct

SEQ ID NO: 949 - RNA, 20 nt, synthetic construct
  misc_feature 1..20: note = Description of Artificial Sequence: Synthetic oligonucleotide
  source 1..20: mol_type = other RNA
aagcattctatgcaaaaaga

SEQ ID NO: 950 - RNA, 20 nt, synthetic construct
  misc_feature 1..20: note = Description of Artificial Sequence: Synthetic oligonucleotide
  source 1..20: mol_type = other RNA
cattctatgcaaaaagaagg

SEQ ID NO: 951 - RNA, 20 nt, synthetic construct
  misc_feature 1..20: note = Description of Artificial Sequence: Synthetic oligonucleotide
  source 1..20: mol_type = other RNA
attctatgcaaaaagaaggt

SEQ ID NO: 952 - RNA, 20 nt, synthetic construct
  misc_feature 1..20: note = Description of Artificial Sequence: Synthetic oligonucleotide
  source 1..20: mol_type = other RNA
ttctatgcaaaaagaaggtg

SEQ ID NO: 953 - RNA, 20 nt, synthetic construct
  misc_feature 1..20: note = Description of Artificial Sequence: Synthetic oligonucleotide
  source 1..20: mol_type = other RNA
caatttacatttttaaacac

SEQ ID NO: 954 - RNA, 20 nt, synthetic construct
  misc_feature 1..20: note = Description of Artificial Sequence: Synthetic oligonucleotide
  source 1..20: mol_type = other RNA
ttaaacactggttctattat

SEQ ID NO: 955 - RNA, 20 nt, synthetic construct
  misc_feature 1..20: note = Description of Artificial Sequence: Synthetic oligonucleotide
  source 1..20: mol_type = other RNA
atatcaagtttgcatagtca

SEQ ID NO: 956 - RNA, 20 nt, synthetic construct
  misc_feature 1..20: note = Description of Artificial Sequence: Synthetic oligonucleotide
  source 1..20: mol_type = other RNA
tactgtagtattacagtgac

SEQ ID NO: 957 - RNA, 20 nt, synthetic construct
  misc_feature 1..20: note = Description of Artificial Sequence: Synthetic oligonucleotide
  source 1..20: mol_type = other RNA
aggaatcttaaaataccatc

SEQ ID NO: 958 - RNA, 20 nt, synthetic construct
  misc_feature 1..20: note = Description of Artificial Sequence: Synthetic oligonucleotide
  source 1..20: mol_type = other RNA
tatatgatgtactgaaatac

SEQ ID NO: 959 - RNA, 20 nt, synthetic construct
  misc_feature 1..20: note = Description of Artificial Sequence: Synthetic oligonucleotide
  source 1..20: mol_type = other RNA
gtactgaaatactggaatta

SEQ ID NO: 960 - RNA, 20 nt, synthetic construct
  misc_feature 1..20: note = Description of Artificial Sequence: Synthetic oligonucleotide
  source 1..20: mol_type = other RNA
ttatttatcaaaatagctac

SEQ ID NO: 961 - RNA, 20 nt, synthetic construct
  misc_feature 1..20: note = Description of Artificial Sequence: Synthetic oligonucleotide
  source 1..20: mol_type = other RNA
ctacaggaaacatgaatagc

SEQ ID NO: 962 - RNA, 20 nt, synthetic construct
  misc_feature 1..20: note = Description of Artificial Sequence: Synthetic oligonucleotide
  source 1..20: mol_type = other RNA
aggaaaacactgaatttgtt

SEQ ID NO: 963 - RNA, 20 nt, synthetic construct
  misc_feature 1..20: note = Description of Artificial Sequence: Synthetic oligonucleotide
  source 1..20: mol_type = other RNA
tgtttggatgttctaagaaa

SEQ ID NO: 964 - RNA, 20 nt, synthetic construct
  misc_feature 1..20: note = Description of Artificial Sequence: Synthetic oligonucleotide
  source 1..20: mol_type = other RNA
aagaaatggtgctaagaaaa

SEQ ID NO: 965 - RNA, 20 nt, synthetic construct
  misc_feature 1..20: note = Description of Artificial Sequence: Synthetic oligonucleotide
  source 1..20: mol_type = other RNA
ctccagtgcccttgaataat

SEQ ID NO: 966 - RNA, 20 nt, synthetic construct
  misc_feature 1..20: note = Description of Artificial Sequence: Synthetic oligonucleotide
  source 1..20: mol_type = other RNA
tccagtgcccttgaataata

SEQ ID NO: 967 - RNA, 20 nt, synthetic construct
  misc_feature 1..20: note = Description of Artificial Sequence: Synthetic oligonucleotide
  source 1..20: mol_type = other RNA
ccagtgcccttgaataatag

SEQ ID NO: 968 - RNA, 20 nt, synthetic construct
  misc_feature 1..20: note = Description of Artificial Sequence: Synthetic oligonucleotide
  source 1..20: mol_type = other RNA
caagcttagtttttaaaatg

SEQ ID NO: 969 - RNA, 20 nt, synthetic construct
  misc_feature 1..20: note = Description of Artificial Sequence: Synthetic oligonucleotide
  source 1..20: mol_type = other RNA
ttaaaatgtggacattttaa

SEQ ID NO: 970 - RNA, 20 nt, synthetic construct
  misc_feature 1..20: note = Description of Artificial Sequence: Synthetic oligonucleotide
  source 1..20: mol_type = other RNA
gtggacattttaaaggcctc

SEQ ID NO: 971 - RNA, 20 nt, synthetic construct
  misc_feature 1..20: note = Description of Artificial Sequence: Synthetic oligonucleotide
  source 1..20: mol_type = other RNA
tcatccagtgaagtccttgt

SEQ ID NO: 972 - RNA, 20 nt, synthetic construct
  misc_feature 1..20: note = Description of Artificial Sequence: Synthetic oligonucleotide
  source 1..20: mol_type = other RNA
tgacaacttgaacaatgcta

SEQ ID NO: 973 - RNA, 20 nt, synthetic construct
  misc_feature 1..20: note = Description of Artificial Sequence: Synthetic oligonucleotide
  source 1..20: mol_type = other RNA
atgcaaagttgattttttta

SEQ ID NO: 974 - RNA, 20 nt, synthetic construct
  misc_feature 1..20: note = Description of Artificial Sequence: Synthetic oligonucleotide
  source 1..20: mol_type = other RNA
acagccagttaaatccacca

SEQ ID NO: 975 - RNA, 20 nt, synthetic construct
  misc_feature 1..20: note = Description of Artificial Sequence: Synthetic oligonucleotide
  source 1..20: mol_type = other RNA
cagccagttaaatccaccat

SEQ ID NO: 976 - RNA, 20 nt, synthetic construct
  misc_feature 1..20: note = Description of Artificial Sequence: Synthetic oligonucleotide
  source 1..20: mol_type = other RNA
agccagttaaatccaccatg

SEQ ID NO: 977 - RNA, 20 nt, synthetic construct
  misc_feature 1..20: note = Description of Artificial Sequence: Synthetic oligonucleotide
  source 1..20: mol_type = other RNA
aaatccaccatggggcttac

SEQ ID NO: 978 - RNA, 20 nt, synthetic construct
  misc_feature 1..20: note = Description of Artificial Sequence: Synthetic oligonucleotide
  source 1..20: mol_type = other RNA
catggggcttactggattca

SEQ ID NO: 979 - RNA, 20 nt, synthetic construct
  misc_feature 1..20: note = Description of Artificial Sequence: Synthetic oligonucleotide
  source 1..20: mol_type = other RNA
atggggcttactggattcaa

SEQ ID NO: 980 - RNA, 20 nt, synthetic construct
  misc_feature 1..20: note = Description of Artificial Sequence: Synthetic oligonucleotide
  source 1..20: mol_type = other RNA
agtccacaaaacatgttttc

SEQ ID NO: 981 - RNA, 20 nt, synthetic construct
  misc_feature 1..20: note = Description of Artificial Sequence: Synthetic oligonucleotide
  source 1..20: mol_type = other RNA
aagaattttctattaactgc

SEQ ID NO: 982 - RNA, 20 nt, synthetic construct
  misc_feature 1..20: note = Description of Artificial Sequence: Synthetic oligonucleotide
  source 1..20: mol_type = other RNA
ctgaagcctatgctatttta

SEQ ID NO: 983 - RNA, 20 nt, synthetic construct
  misc_feature 1..20: note = Description of Artificial Sequence: Synthetic oligonucleotide
  source 1..20: mol_type = other RNA
tatgctattttatggatcat

SEQ ID NO: 984 - RNA, 20 nt, synthetic construct
  misc_feature 1..20: note = Description of Artificial Sequence: Synthetic oligonucleotide
  source 1..20: mol_type = other RNA
aggctcttcagagaactgaa

SEQ ID NO: 985 - RNA, 20 nt, synthetic construct
  misc_feature 1..20: note = Description of Artificial Sequence: Synthetic oligonucleotide
  source 1..20: mol_type = other RNA
taagtgtcctctttaacaag

SEQ ID NO: 986 - RNA, 20 nt, synthetic construct
  misc_feature 1..20: note = Description of Artificial Sequence: Synthetic oligonucleotide
  source 1..20: mol_type = other RNA
cctgcataagatgaataaac

SEQ ID NO: 987 - RNA, 20 nt, synthetic construct
  misc_feature 1..20: note = Description of Artificial Sequence: Synthetic oligonucleotide
  source 1..20: mol_type = other RNA
ctgcataagatgaataaaca

SEQ ID NO: 988 - RNA, 20 nt, synthetic construct
  misc_feature 1..20: note = Description of Artificial Sequence: Synthetic oligonucleotide
  source 1..20: mol_type = other RNA
agttaaaaagaaacaaaaac

SEQ ID NO: 989 - RNA, 20 nt, synthetic construct
  misc_feature 1..20: note = Description of Artificial Sequence: Synthetic oligonucleotide
  source 1..20: mol_type = other RNA
aagaaacaaaaacaggcagc

SEQ ID NO: 990 - RNA, 20 nt, synthetic construct
  misc_feature 1..20: note = Description of Artificial Sequence: Synthetic oligonucleotide
  source 1..20: mol_type = other RNA
aacaggcagctggtttgctg

SEQ ID NO: 991 - RNA, 20 nt, synthetic construct
  misc_feature 1..20: note = Description of Artificial Sequence: Synthetic oligonucleotide
  source 1..20: mol_type = other RNA
aggcagctggtttgctgtgg

SEQ ID NO: 992 - RNA, 20 nt, synthetic construct
  misc_feature 1..20: note = Description of Artificial Sequence: Synthetic oligonucleotide
  source 1..20: mol_type = other RNA
aagcagaattcacatcatga

SEQ ID NO: 993 - RNA, 20 nt, synthetic construct
  misc_feature 1..20: note = Description of Artificial Sequence: Synthetic oligonucleotide
  source 1..20: mol_type = other RNA
catatacctcaacactagtt

SEQ ID NO: 994 - RNA, 20 nt, synthetic construct
  misc_feature 1..20: note = Description of Artificial Sequence: Synthetic oligonucleotide
  source 1..20: mol_type = other RNA
ctcaacactagtttggcaat

SEQ ID NO: 995 - RNA, 20 nt, synthetic construct
  misc_feature 1..20: note = Description of Artificial Sequence: Synthetic oligonucleotide
  source 1..20: mol_type = other RNA
cctttttgttctaaaaattc

SEQ ID NO: 996 - RNA, 20 nt, synthetic construct
  misc_feature 1..20: note = Description of Artificial Sequence: Synthetic oligonucleotide
  source 1..20: mol_type = other RNA
ctttttgttctaaaaattca

SEQ ID NO: 997 - RNA, 20 nt, synthetic construct
  misc_feature 1..20: note = Description of Artificial Sequence: Synthetic oligonucleotide
  source 1..20: mol_type = other RNA
tgtttatgtaaaattgttgt

SEQ ID NO: 998 - RNA, 20 nt, synthetic construct
  misc_feature 1..20: note = Description of Artificial Sequence: Synthetic oligonucleotide
  source 1..20: mol_type = other RNA
taataaatatattctttgtc

SEQ ID NO: 999 - RNA, 20 nt, synthetic construct
  misc_feature 1..20: note = Description of Artificial Sequence: Synthetic oligonucleotide
  source 1..20: mol_type = other RNA
aataaatatattctttgtca

SEQ ID NO: 1000 - RNA, 20 nt, synthetic construct
  misc_feature 1..20: note = Description of Artificial Sequence: Synthetic oligonucleotide
  source 1..20: mol_type = other RNA
aactaattttgtaaatctgt

SEQ ID NO: 1001 - RNA, 20 nt, synthetic construct
  misc_feature 1..20: note = Description of Artificial Sequence: Synthetic oligonucleotide
  source 1..20: mol_type = other RNA
aaaagcattttaaaagtttg

SEQ ID NO: 1002 - RNA, 20 nt, synthetic construct
  misc_feature 1..20: note = Description of Artificial Sequence: Synthetic oligonucleotide
  source 1..20: mol_type = other RNA
atcttttgactgtttcaagc

SEQ ID NO: 1003 - RNA, 20 nt, synthetic construct
  misc_feature 1..20: note = Description of Artificial Sequence: Synthetic oligonucleotide
  source 1..20: mol_type = other RNA
agaatgcactgagttgataa

SEQ ID NO: 1004 - RNA, 20 nt, synthetic construct
  misc_feature 1..20: note = Description of Artificial Sequence: Synthetic oligonucleotide
  source 1..20: mol_type = other RNA
gaatgcactgagttgataaa

SEQ ID NO: 1005 - RNA, 20 nt, synthetic construct
  misc_feature 1..20: note = Description of Artificial Sequence: Synthetic oligonucleotide
  source 1..20: mol_type = other RNA
tgataaagggaaaaattgta

SEQ ID NO: 1006 - RNA, 20 nt, synthetic construct
  misc_feature 1..20: note = Description of Artificial Sequence: Synthetic oligonucleotide
  source 1..20: mol_type = other RNA
aaagggaaaaattgtaaggc

SEQ ID NO: 1007 - RNA, 20 nt, synthetic construct
  misc_feature 1..20: note = Description of Artificial Sequence: Synthetic oligonucleotide
  source 1..20: mol_type = other RNA
aaaattgtaaggcaggagtt

SEQ ID NO: 1008 - RNA, 20 nt, synthetic construct
  misc_feature 1..20: note = Description of Artificial Sequence: Synthetic oligonucleotide
  source 1..20: mol_type = other RNA
taaggcaggagtttggcaag

SEQ ID NO: 1009 - RNA, 20 nt, synthetic construct
  misc_feature 1..20: note = Description of Artificial Sequence: Synthetic oligonucleotide
  source 1..20: mol_type = other RNA
ggagtttggcaagtggctgt

SEQ ID NO: 1010 - RNA, 20 nt, synthetic construct
  misc_feature 1..20: note = Description of Artificial Sequence: Synthetic oligonucleotide
  source 1..20: mol_type = other RNA
tttgatcctgtaatcactga

SEQ ID NO: 1011 - RNA, 20 nt, synthetic construct
  misc_feature 1..20: note = Description of Artificial Sequence: Synthetic oligonucleotide
  source 1..20: mol_type = other RNA
ctgaaggtacatactccatg

SEQ ID NO: 1012 - RNA, 20 nt, synthetic construct
  misc_feature 1..20: note = Description of Artificial Sequence: Synthetic oligonucleotide
  source 1..20: mol_type = other RNA
catgtggacttcccttaaac

SEQ ID NO: 1013 - RNA, 20 nt, synthetic construct
  misc_feature 1..20: note = Description of Artificial Sequence: Synthetic oligonucleotide
  source 1..20: mol_type = other RNA
ttaaacaggcaaacacctac

SEQ ID NO: 1014 - RNA, 20 nt, synthetic construct
  misc_feature 1..20: note = Description of Artificial Sequence: Synthetic oligonucleotide
  source 1..20: mol_type = other RNA
caggcaaacacctacaggta

SEQ ID NO: 1015 - RNA, 20 nt, synthetic construct
  misc_feature 1..20: note = Description of Artificial Sequence: Synthetic oligonucleotide
  source 1..20: mol_type = other RNA
cagattgtacaattacattt

SEQ ID NO: 1016 - RNA, 20 nt, synthetic construct
  misc_feature 1..20: note = Description of Artificial Sequence: Synthetic oligonucleotide
  source 1..20: mol_type = other RNA
taaaataaattcttaatcag

SEQ ID NO: 1017 - RNA, 20 nt, synthetic construct
  misc_feature 1..20: note = Description of Artificial Sequence: Synthetic oligonucleotide
  source 1..20: mol_type = other RNA
aataaattcttaatcagagg

SEQ ID NO: 1018 - RNA, 20 nt, synthetic construct
  misc_feature 1..20: note = Description of Artificial Sequence: Synthetic oligonucleotide
  source 1..20: mol_type = other RNA
tcttaatcagaggaggcctt

SEQ ID NO: 1019 - RNA, 20 nt, synthetic construct
  misc_feature 1..20: note = Description of Artificial Sequence: Synthetic oligonucleotide
  source 1..20: mol_type = other RNA
cttaatcagaggaggccttt

SEQ ID NO: 1020 - RNA, 20 nt, synthetic construct
  misc_feature 1..20: note = Description of Artificial Sequence: Synthetic oligonucleotide
  source 1..20: mol_type = other RNA
aggaggcctttgggttttat

SEQ ID NO: 1021 - RNA, 20 nt, synthetic construct
  misc_feature 1..20: note = Description of Artificial Sequence: Synthetic oligonucleotide
  source 1..20: mol_type = other RNA
ttggtcaaatctttgtaagc

SEQ ID NO: 1022 - RNA, 20 nt, synthetic construct
  misc_feature 1..20: note = Description of Artificial Sequence: Synthetic oligonucleotide
  source 1..20: mol_type = other RNA
taaaaaatttcttgaatttg

SEQ ID NO: 1023 - RNA, 20 nt, synthetic construct
  misc_feature 1..20: note = Description of Artificial Sequence: Synthetic oligonucleotide
  source 1..20: mol_type = other RNA
tttgattactacatgtgcat

SEQ ID NO: 1024 - RNA, 20 nt, synthetic construct
  misc_feature 1..20: note = Description of Artificial Sequence: Synthetic oligonucleotide
  source 1..20: mol_type = other RNA
actgtcatttgttaaactgc

SEQ ID NO: 1025 - RNA, 20 nt, synthetic construct
  misc_feature 1..20: note = Description of Artificial Sequence: Synthetic oligonucleotide
  source 1..20: mol_type = other RNA
aactgctggccaacaagaac

SEQ ID NO: 1026 - RNA, 20 nt, synthetic construct
  misc_feature 1..20: note = Description of Artificial Sequence: Synthetic oligonucleotide
  source 1..20: mol_type = other RNA
caagaacaggaagtatagtt

SEQ ID NO: 1027 - RNA, 20 nt, synthetic construct
  misc_feature 1..20: note = Description of Artificial Sequence: Synthetic oligonucleotide
  source 1..20: mol_type = other RNA
aagaacaggaagtatagttt

SEQ ID NO: 1028 - RNA, 20 nt, synthetic construct
  misc_feature 1..20: note = Description of Artificial Sequence: Synthetic oligonucleotide
  source 1..20: mol_type = other RNA
agaacaggaagtatagtttg

SEQ ID NO: 1029 - RNA, 20 nt, synthetic construct
  misc_feature 1..20: note = Description of Artificial Sequence: Synthetic oligonucleotide
  source 1..20: mol_type = other RNA
gaacaggaagtatagtttgg

SEQ ID NO: 1030 - RNA, 20 nt, synthetic construct
  misc_feature 1..20: note = Description of Artificial Sequence: Synthetic oligonucleotide
  source 1..20: mol_type = other RNA
aacaggaagtatagtttggg

SEQ ID NO: 1031 - RNA, 20 nt, synthetic construct
  misc_feature 1..20: note = Description of Artificial Sequence: Synthetic oligonucleotide
  source 1..20: mol_type = other RNA
ggaagtatagtttggggggt

SEQ ID NO: 1032 - RNA, 20 nt, synthetic construct
  misc_feature 1..20: note = Description of Artificial Sequence: Synthetic oligonucleotide
  source 1..20: mol_type = other RNA
gaagtatagtttggggggtt

SEQ ID NO: 1033 - RNA, 20 nt, synthetic construct
  misc_feature 1..20: note = Description of Artificial Sequence: Synthetic oligonucleotide
  source 1..20: mol_type = other RNA
aagtatagtttggggggttg

SEQ ID NO: 1034 - RNA, 20 nt, synthetic construct
  misc_feature 1..20: note = Description of Artificial Sequence: Synthetic oligonucleotide
  source 1..20: mol_type = other RNA
ggttggggagagtttacata

SEQ ID NO: 1035 - RNA, 20 nt, synthetic construct
  misc_feature 1..20: note = Description of Artificial Sequence: Synthetic oligonucleotide
  source 1..20: mol_type = other RNA
aaggaagagaagaaattgag

SEQ ID NO: 1036 - RNA, 20 nt, synthetic construct
  misc_feature 1..20: note = Description of Artificial Sequence: Synthetic oligonucleotide
  source 1..20: mol_type = other RNA
cctgcctcagttagaatgaa

SEQ ID NO: 1037 - RNA, 20 nt, synthetic construct
  misc_feature 1..20: note = Description of Artificial Sequence: Synthetic oligonucleotide
  source 1..20: mol_type = other RNA
gatctacaatttgctaatat

SEQ ID NO: 1038 - RNA, 20 nt, synthetic construct
  misc_feature 1..20: note = Description of Artificial Sequence: Synthetic oligonucleotide
  source 1..20: mol_type = other RNA
tttgctaatataggaatatc

SEQ ID NO: 1039 - RNA, 20 nt, synthetic construct
  misc_feature 1..20: note = Description of Artificial Sequence: Synthetic oligonucleotide
  source 1..20: mol_type = other RNA
tacttgaaaatgcttctgag

SEQ ID NO: 1040 - RNA, 20 nt, synthetic construct
  misc_feature 1..20: note = Description of Artificial Sequence: Synthetic oligonucleotide
  source 1..20: mol_type = other RNA
cagttcacttctgaagctag

SEQ ID NO: 1041 - RNA, 20 nt, synthetic construct
  misc_feature 1..20: note = Description of Artificial Sequence: Synthetic oligonucleotide
  source 1..20: mol_type = other RNA
agctagtggttaacttgtgt

SEQ ID NO: 1042 - RNA, 20 nt, synthetic construct
  misc_feature 1..20: note = Description of Artificial Sequence: Synthetic oligonucleotide
  source 1..20: mol_type = other RNA
tttcattttcatgagatgtt

SEQ ID NO: 1043 - RNA, 20 nt, synthetic construct
  misc_feature 1..20: note = Description of Artificial Sequence: Synthetic oligonucleotide
  source 1..20: mol_type = other RNA
tgtttggtttataagatctg

SEQ ID NO: 1044 - RNA, 20 nt, synthetic construct
  misc_feature 1..20: note = Description of Artificial Sequence: Synthetic oligonucleotide
  source 1..20: mol_type = other RNA
tggtttataagatctgagga

SEQ ID NO: 1045 - RNA, 20 nt, synthetic construct
  misc_feature 1..20: note = Description of Artificial Sequence: Synthetic oligonucleotide
  source 1..20: mol_type = other RNA
tattgtaatgttatgaatgc

SEQ ID NO: 1046 - RNA, 20 nt, synthetic construct
  misc_feature 1..20: note = Description of Artificial Sequence: Synthetic oligonucleotide
  source 1..20: mol_type = other RNA
tcgcaaaagttctgtggaca

SEQ ID NO: 1047 - RNA, 20 nt, synthetic construct
  misc_feature 1..20: note = Description of Artificial Sequence: Synthetic oligonucleotide
  source 1..20: mol_type = other RNA
gtcgcaaaagttctgtggac

SEQ ID NO: 1048 - RNA, 20 nt, synthetic construct
  misc_feature 1..20: note = Description of Artificial Sequence: Synthetic oligonucleotide
  source 1..20: mol_type = other RNA
acaaagtcgcaaaagttctg

SEQ ID NO: 1049 - RNA, 20 nt, synthetic construct
  misc_feature 1..20: note = Description of Artificial Sequence: Synthetic oligonucleotide
  source 1..20: mol_type = other RNA
agttgacagactctgtctga

SEQ ID NO: 1050 - RNA, 20 nt, synthetic construct
  misc_feature 1..20: note = Description of Artificial Sequence: Synthetic oligonucleotide
  source 1..20: mol_type = other RNA
gagttgacagactctgtctg

SEQ ID NO: 1051 - RNA, 20 nt, synthetic construct
  misc_feature 1..20: note = Description of Artificial Sequence: Synthetic oligonucleotide
  source 1..20: mol_type = other RNA
ccgtctcatgtatggattgg

SEQ ID NO: 1052 - RNA, 20 nt, synthetic construct
  misc_feature 1..20: note = Description of Artificial Sequence: Synthetic oligonucleotide
  source 1..20: mol_type = other RNA
gggccgtctcatgtatggat

SEQ ID NO: 1053 - RNA, 20 nt, synthetic construct
  misc_feature 1..20: note = Description of Artificial Sequence: Synthetic oligonucleotide
  source 1..20: mol_type = other RNA
ggattgggccgtctcatgta

SEQ ID NO: 1054 - RNA, 20 nt, synthetic construct
  misc_feature 1..20: note = Description of Artificial Sequence: Synthetic oligonucleotide
  source 1..20: mol_type = other RNA
ggataaggactaactggatt

SEQ ID NO: 1055 - RNA, 20 nt, synthetic construct
  misc_feature 1..20: note = Description of Artificial Sequence: Synthetic oligonucleotide
  source 1..20: mol_type = other RNA
tggataaggactaactggat

SEQ ID NO: 1056 - RNA, 20 nt, synthetic construct
  misc_feature 1..20: note = Description of Artificial Sequence: Synthetic oligonucleotide
  source 1..20: mol_type = other RNA
gagtttggataaggactaac

SEQ ID NO: 1057 - RNA, 20 nt, synthetic construct
  misc_feature 1..20: note = Description of Artificial Sequence: Synthetic oligonucleotide
  source 1..20: mol_type = other RNA
gtgtgtgaagagtttggata

SEQ ID NO: 1058 - RNA, 20 nt, synthetic construct
  misc_feature 1..20: note = Description of Artificial Sequence: Synthetic oligonucleotide
  source 1..20: mol_type = other RNA
tctgaagtgtgtgaagagtt

SEQ ID NO: 1059 - RNA, 20 nt, synthetic construct
  misc_feature 1..20: note = Description of Artificial Sequence: Synthetic oligonucleotide
  source 1..20: mol_type = other RNA
ggaatagaagttcatagggc

SEQ ID NO: 1060 - RNA, 20 nt, synthetic construct
  misc_feature 1..20: note = Description of Artificial Sequence: Synthetic oligonucleotide
  source 1..20: mol_type = other RNA
aggtggaatagaagttcata

SEQ ID NO: 1061 - RNA, 20 nt, synthetic construct
  misc_feature 1..20: note = Description of Artificial Sequence: Synthetic oligonucleotide
  source 1..20: mol_type = other RNA
gaggtggaatagaagttcat

SEQ ID NO: 1062 - RNA, 20 nt, synthetic construct
  misc_feature 1..20: note = Description of Artificial Sequence: Synthetic oligonucleotide
  source 1..20: mol_type = other RNA
acctgcagcttgagatgagg

SEQ ID NO: 1063 - RNA, 20 nt, synthetic construct
  misc_feature 1..20: note = Description of Artificial Sequence: Synthetic oligonucleotide
  source 1..20: mol_type = other RNA
tgaacctgcagcttgagatg

SEQ ID NO: 1064 - RNA, 20 nt, synthetic construct
  misc_feature 1..20: note = Description of Artificial Sequence: Synthetic oligonucleotide
  source 1..20: mol_type = other RNA
agcccagggtaagggttcat

SEQ ID NO: 1065 - RNA, 20 nt, synthetic construct
  misc_feature 1..20: note = Description of Artificial Sequence: Synthetic oligonucleotide
  source 1..20: mol_type = other RNA
aagcccagggtaagggttca

SEQ ID NO: 1066 - RNA, 20 nt, synthetic construct
  misc_feature 1..20: note = Description of Artificial Sequence: Synthetic oligonucleotide
  source 1..20: mol_type = other RNA
gattcaaaagcccagggtaa

SEQ ID NO: 1067 - RNA, 20 nt, synthetic construct
  misc_feature 1..20: note = Description of Artificial Sequence: Synthetic oligonucleotide
  source 1..20: mol_type = other RNA
tgattcaaaagcccagggta

SEQ ID NO: 1068 - RNA, 20 nt, synthetic construct
  misc_feature 1..20: note = Description of Artificial Sequence: Synthetic oligonucleotide
  source 1..20: mol_type = other RNA
tattctgattcaaaagccca

SEQ ID NO: 1069 - RNA, 20 nt, synthetic construct
  misc_feature 1..20: note = Description of Artificial Sequence: Synthetic oligonucleotide
  source 1..20: mol_type = other RNA
gtattctgattcaaaagccc

SEQ ID NO: 1070 - RNA, 20 nt, synthetic construct
  misc_feature 1..20: note = Description of Artificial Sequence: Synthetic oligonucleotide
  source 1..20: mol_type = other RNA
gcattgatatgatggatatt

SEQ ID NO: 1071 - RNA, 20 nt, synthetic construct
  misc_feature 1..20: note = Description of Artificial Sequence: Synthetic oligonucleotide
  source 1..20: mol_type = other RNA
tgcattgatatgatggatat

SEQ ID NO: 1072 - RNA, 20 nt, synthetic construct
  misc_feature 1..20: note = Description of Artificial Sequence: Synthetic oligonucleotide
  source 1..20: mol_type = other RNA
tttccattgcattgatatga

SEQ ID NO: 1073 - RNA, 20 nt, synthetic construct
  misc_feature 1..20: note = Description of Artificial Sequence: Synthetic oligonucleotide
  source 1..20: mol_type = other RNA
gggagcagttgtccactgat

SEQ ID NO: 1074 - RNA, 20 nt, synthetic construct
  misc_feature 1..20: note = Description of Artificial Sequence: Synthetic oligonucleotide
  source 1..20: mol_type = other RNA
agaataggaacccagatatg

SEQ ID NO: 1075 - RNA, 20 nt, synthetic construct
  misc_feature 1..20: note = Description of Artificial Sequence: Synthetic oligonucleotide
  source 1..20: mol_type = other RNA
gagaataggaacccagatat

SEQ ID NO: 1076 - RNA, 20 nt, synthetic construct
  misc_feature 1..20: note = Description of Artificial Sequence: Synthetic oligonucleotide
  source 1..20: mol_type = other RNA
ggagaataggaacccagata

SEQ ID NO: 1077 - RNA, 20 nt, synthetic construct
  misc_feature 1..20: note = Description of Artificial Sequence: Synthetic oligonucleotide
  source 1..20: mol_type = other RNA
cggctgagactggggagaat

SEQ ID NO: 1078 - RNA, 20 nt, synthetic construct
  misc_feature 1..20: note = Description of Artificial Sequence: Synthetic oligonucleotide
  source 1..20: mol_type = other RNA
agatccatcggctgagactg

SEQ ID NO: 1079 - RNA, 20 nt, synthetic construct
  misc_feature 1..20: note = Description of Artificial Sequence: Synthetic oligonucleotide
  source 1..20: mol_type = other RNA
cagatccatcggctgagact

SEQ ID NO: 1080 - RNA, 20 nt, synthetic construct
  misc_feature 1..20: note = Description of Artificial Sequence: Synthetic oligonucleotide
  source 1..20: mol_type = other RNA
acagatccatcggctgagac

SEQ ID NO: 1081 - RNA, 20 nt, synthetic construct
  misc_feature 1..20: note = Description of Artificial Sequence: Synthetic oligonucleotide
  source 1..20: mol_type = other RNA
ggatacctatacagatccat

SEQ ID NO: 1082 - RNA, 20 nt, synthetic construct
  misc_feature 1..20: note = Description of Artificial Sequence: Synthetic oligonucleotide
  source 1..20: mol_type = other RNA
ttagacagagggtcttggct

SEQ ID NO: 1083 - RNA, 20 nt, synthetic construct
  misc_feature 1..20: note = Description of Artificial Sequence: Synthetic oligonucleotide
  source 1..20: mol_type = other RNA
tgagcttagacagagggtct

SEQ ID NO: 1084 - RNA, 20 nt, synthetic construct
  misc_feature 1..20: note = Description of Artificial Sequence: Synthetic oligonucleotide
  source 1..20: mol_type = other RNA
gtagactgagcttagacaga

SEQ ID NO: 1085 - RNA, 20 nt, synthetic construct
  misc_feature 1..20: note = Description of Artificial Sequence: Synthetic oligonucleotide
  source 1..20: mol_type = other RNA
ggtagactgagcttagacag

SEQ ID NO: 1086 - RNA, 20 nt, synthetic construct
  misc_feature 1..20: note = Description of Artificial Sequence: Synthetic oligonucleotide
  source 1..20: mol_type = other RNA
tggtaaagtgtatggatggg

SEQ ID NO: 1087 - RNA, 20 nt, synthetic construct
  misc_feature 1..20: note = Description of Artificial Sequence: Synthetic oligonucleotide
  source 1..20: mol_type = other RNA
ggctggtaaagtgtatggat

SEQ ID NO: 1088 - RNA, 20 nt, synthetic construct
  misc_feature 1..20: note = Description of Artificial Sequence: Synthetic oligonucleotide
  source 1..20: mol_type = other RNA
tggctggtaaagtgtatgga

SEQ ID NO: 1089 - RNA, 20 nt, synthetic construct
  misc_feature 1..20: note = Description of Artificial Sequence: Synthetic oligonucleotide
  source 1..20: mol_type = other RNA
accttggctggtaaagtgta

SEQ ID NO: 1090 - RNA, 20 nt, synthetic construct
  misc_feature 1..20: note = Description of Artificial Sequence: Synthetic oligonucleotide
  source 1..20: mol_type = other RNA
ggctatttccaaaccttggc

SEQ ID NO: 1091 - RNA, 20 nt, synthetic construct
  misc_feature 1..20: note = Description of Artificial Sequence: Synthetic oligonucleotide
  source 1..20: mol_type = other RNA
ctctggctatttccaaacct

SEQ ID NO: 1092 - RNA, 20 nt, synthetic construct
  misc_feature 1..20: note = Description of Artificial Sequence: Synthetic oligonucleotide
  source 1..20: mol_type = other RNA
agtatttagatgtaaaactc

SEQ ID NO: 1093 - RNA, 20 nt, synthetic construct
  misc_feature 1..20: note = Description of Artificial Sequence: Synthetic oligonucleotide
  source 1..20: mol_type = other RNA
aaccatctccctgcatattt

SEQ ID NO: 1094 - RNA, 20 nt, synthetic construct
  misc_feature 1..20: note = Description of Artificial Sequence: Synthetic oligonucleotide
  source 1..20: mol_type = other RNA
atgatgtacatttggtctaa

SEQ ID NO: 1095 - RNA, 20 nt, synthetic construct
  misc_feature 1..20: note = Description of Artificial Sequence: Synthetic oligonucleotide
  source 1..20: mol_type = other RNA
ttccctacatgatgtacatt

SEQ ID NO: 1096 - RNA, 20 nt, synthetic construct
  misc_feature 1..20: note = Description of Artificial Sequence: Synthetic oligonucleotide
  source 1..20: mol_type = other RNA
atctcatgagtgggataagg

SEQ ID NO: 1097 - RNA, 20 nt, synthetic construct
  misc_feature 1..20: note = Description of Artificial Sequence: Synthetic oligonucleotide
  source 1..20: mol_type = other RNA
tccatctcatgagtgggata

SEQ ID NO: 1098 - RNA, 20 nt, synthetic construct
  misc_feature 1..20: note = Description of Artificial Sequence: Synthetic oligonucleotide
  source 1..20: mol_type = other RNA
tggccatccatctcatgagt

SEQ ID NO: 1099 - RNA, 20 nt, synthetic construct
  misc_feature 1..20: note = Description of Artificial Sequence: Synthetic oligonucleotide
  source 1..20: mol_type = other RNA
gtggccatccatctcatgag

SEQ ID NO: 1100 - RNA, 20 nt, synthetic construct
  misc_feature 1..20: note = Description of Artificial Sequence: Synthetic oligonucleotide
  source 1..20: mol_type = other RNA
tagaggtggctcccatgaag

SEQ ID NO: 1101 - RNA, 20 nt, synthetic construct
  misc_feature 1..20: note = Description of Artificial Sequence: Synthetic oligonucleotide
  source 1..20: mol_type = other RNA
attgggtggtaatctagagg

SEQ ID NO: 1102 - RNA, 20 nt, synthetic construct
  misc_feature 1..20: note = Description of Artificial Sequence: Synthetic oligonucleotide
  source 1..20: mol_type = other RNA
cagattgggtggtaatctag

SEQ ID NO: 1103 - RNA, 20 nt, synthetic construct
  misc_feature 1..20: note = Description of Artificial Sequence: Synthetic oligonucleotide
  source 1..20: mol_type = other RNA
tttggattgctcagattggg

SEQ ID NO: 1104 - RNA, 20 nt, synthetic construct
  misc_feature 1..20: note = Description of Artificial Sequence: Synthetic oligonucleotide
  source 1..20: mol_type = other RNA
atgtttggattgctcagatt

SEQ ID NO: 1105 - RNA, 20 nt, synthetic construct
  misc_feature 1..20: note = Description of Artificial Sequence: Synthetic oligonucleotide
  source 1..20: mol_type = other RNA
catgtttggattgctcagat

SEQ ID NO: 1106 - RNA, 20 nt, synthetic construct
  misc_feature 1..20: note = Description of Artificial Sequence: Synthetic oligonucleotide
  source 1..20: mol_type = other RNA
ccatttttatagtccatgtt

SEQ ID NO: 1107 - RNA, 20 nt, synthetic construct
  misc_feature 1..20: note = Description of Artificial Sequence: Synthetic oligonucleotide
  source 1..20: mol_type = other RNA
tagttatggattatgtgaga

SEQ ID NO: 1108 - RNA, 20 nt, synthetic construct
  misc_feature 1..20: note = Description of Artificial Sequence: Synthetic oligonucleotide
  source 1..20: mol_type = other RNA
ccggagctgcactgtagtta

SEQ ID NO: 1109 - RNA, 20 nt, synthetic construct
  misc_feature 1..20: note = Description of Artificial Sequence: Synthetic oligonucleotide
  source 1..20: mol_type = other RNA
agagagctgttgaacatgcc

SEQ ID NO: 1110 - RNA, 20 nt, synthetic construct
  misc_feature 1..20: note = Description of Artificial Sequence: Synthetic oligonucleotide
  source 1..20: mol_type = other RNA
ctccttgttttggagatgca

SEQ ID NO: 1111 - RNA, 20 nt, synthetic construct
  misc_feature 1..20: note = Description of Artificial Sequence: Synthetic oligonucleotide
  source 1..20: mol_type = other RNA
tctccttgttttggagatgc

SEQ ID NO: 1112 - RNA, 20 nt, synthetic construct
  misc_feature 1..20: note = Description of Artificial Sequence: Synthetic oligonucleotide
  source 1..20: mol_type = other RNA
gcatgtcattctccttgttt

SEQ ID NO: 1113 - RNA, 20 nt, synthetic construct
  misc_feature 1..20: note = Description of Artificial Sequence: Synthetic oligonucleotide
  source 1..20: mol_type = other RNA
tgataacccattagctgtgt

SEQ ID NO: 1114 - RNA, 20 nt, synthetic construct
  misc_feature 1..20: note = Description of Artificial Sequence: Synthetic oligonucleotide
  source 1..20: mol_type = other RNA
ttgataacccattagctgtg

SEQ ID NO: 1115 - RNA, 20 nt, synthetic construct
  misc_feature 1..20: note = Description of Artificial Sequence: Synthetic oligonucleotide
  source 1..20: mol_type = other RNA
gttctatcatggttaagagc

SEQ ID NO: 1116 - RNA, 20 nt, synthetic construct
  misc_feature 1..20: note = Description of Artificial Sequence: Synthetic oligonucleotide
  source 1..20: mol_type = other RNA
ggacacaagcagttctatca

SEQ ID NO: 1117 - RNA, 20 nt, synthetic construct
  misc_feature 1..20: note = Description of Artificial Sequence: Synthetic oligonucleotide
  source 1..20: mol_type = other RNA
ttaatttgtgtaagcctcct

SEQ ID NO: 1118 - RNA, 20 nt, synthetic construct
  misc_feature 1..20: note = Description of Artificial Sequence: Synthetic oligonucleotide
  source 1..20: mol_type = other RNA
acaccctggactagtgccaa

SEQ ID NO: 1119 - RNA, 20 nt, synthetic construct
  misc_feature 1..20: note = Description of Artificial Sequence: Synthetic oligonucleotide
  source 1..20: mol_type = other RNA
ctgcaccagaagccacaccc

SEQ ID NO: 1120 - RNA, 20 nt, synthetic construct
  misc_feature 1..20: note = Description of Artificial Sequence: Synthetic oligonucleotide
  source 1..20: mol_type = other RNA
acggccactcccccaatgtc

SEQ ID NO: 1121 - RNA, 20 nt, synthetic construct
  misc_feature 1..20: note = Description of Artificial Sequence: Synthetic oligonucleotide
  source 1..20: mol_type = other RNA
tgacccatgagttggagcca

SEQ ID NO: 1122 - RNA, 20 nt, synthetic construct
  misc_feature 1..20: note = Description of Artificial Sequence: Synthetic oligonucleotide
  source 1..20: mol_type = other RNA
atgagaattgacccatgagt

SEQ ID NO: 1123 - RNA, 20 nt, synthetic construct
  misc_feature 1..20: note = Description of Artificial Sequence: Synthetic oligonucleotide
  source 1..20: mol_type = other RNA
gggattctttaaaggggttg

SEQ ID NO: 1124 - RNA, 20 nt, synthetic construct
  misc_feature 1..20: note = Description of Artificial Sequence: Synthetic oligonucleotide
  source 1..20: mol_type = other RNA
cctattgggattctttaaag

SEQ ID NO: 1125 - RNA, 20 nt, synthetic construct
  misc_feature 1..20: note = Description of Artificial Sequence: Synthetic oligonucleotide
  source 1..20: mol_type = other RNA
tcctattgggattctttaaa

SEQ ID NO: 1126 - RNA, 20 nt, synthetic construct
  misc_feature 1..20: note = Description of Artificial Sequence: Synthetic oligonucleotide
  source 1..20: mol_type = other RNA
ttcctattgggattctttaa

SEQ ID NO: 1127 - RNA, 20 nt, synthetic construct
  misc_feature 1..20: note = Description of Artificial Sequence: Synthetic oligonucleotide
  source 1..20: mol_type = other RNA
ctggtggggtgattcctatt

SEQ ID NO: 1128 - RNA, 20 nt, synthetic construct
  misc_feature 1..20: note = Description of Artificial Sequence: Synthetic oligonucleotide
  source 1..20: mol_type = other RNA
cctggtggggtgattcctat

SEQ ID NO: 1129 - RNA, 20 nt, synthetic construct
  misc_feature 1..20: note = Description of Artificial Sequence: Synthetic oligonucleotide
  source 1..20: mol_type = other RNA
agacgagggagatcctggtg

SEQ ID NO: 1130 - RNA, 20 nt, synthetic construct
  misc_feature 1..20: note = Description of Artificial Sequence: Synthetic oligonucleotide
  source 1..20: mol_type = other RNA
aagacgagggagatcctggt

SEQ ID NO: 1131 - RNA, 20 nt, synthetic construct
  misc_feature 1..20: note = Description of Artificial Sequence: Synthetic oligonucleotide
  source 1..20: mol_type = other RNA
aaagacgagggagatcctgg

SEQ ID NO: 1132 - RNA, 20 nt, synthetic construct
  misc_feature 1..20: note = Description of Artificial Sequence: Synthetic oligonucleotide
  source 1..20: mol_type = other RNA
gtaaaagacgagggagatcc

SEQ ID NO: 1133 - RNA, 20 nt, synthetic construct
  misc_feature 1..20: note = Description of Artificial Sequence: Synthetic oligonucleotide
  source 1..20: mol_type = other RNA
cttatgctggtaaaagacga

SEQ ID NO: 1134 - RNA, 20 nt, synthetic construct
  misc_feature 1..20: note = Description of Artificial Sequence: Synthetic oligonucleotide
  source 1..20: mol_type = other RNA
tcttatgctggtaaaagacg

SEQ ID NO: 1135 - RNA, 20 nt, synthetic construct
  misc_feature 1..20: note = Description of Artificial Sequence: Synthetic oligonucleotide
  source 1..20: mol_type = other RNA
gctcattcatgctcttatgc

SEQ ID NO: 1136 - RNA, 20 nt, synthetic construct
  misc_feature 1..20: note = Description of Artificial Sequence: Synthetic oligonucleotide
  source 1..20: mol_type = other RNA
caaagagccaagccatgttt

SEQ ID NO: 1137 - RNA, 20 nt, synthetic construct
  misc_feature 1..20: note = Description of Artificial Sequence: Synthetic oligonucleotide
  source 1..20: mol_type = other RNA
acgggctttttcagccattt

SEQ ID NO: 1138 - RNA, 20 nt, synthetic construct
  misc_feature 1..20: note = Description of Artificial Sequence: Synthetic oligonucleotide
  source 1..20: mol_type = other RNA
acactcttcctctttctcac

SEQ ID NO: 1139 - RNA, 20 nt, synthetic construct
  misc_feature 1..20: note = Description of Artificial Sequence: Synthetic oligonucleotide
  source 1..20: mol_type = other RNA
cacactcttcctctttctca

SEQ ID NO: 1140 - RNA, 20 nt, synthetic construct
  misc_feature 1..20: note = Description of Artificial Sequence: Synthetic oligonucleotide
  source 1..20: mol_type = other RNA
atttctgaggcacatagtct

SEQ ID NO: 1141 - RNA, 20 nt, synthetic construct
  misc_feature 1..20: note = Description of Artificial Sequence: Synthetic oligonucleotide
  source 1..20: mol_type = other RNA
gatttctgaggcacatagtc

SEQ ID NO: 1142 - RNA, 20 nt, synthetic construct
  misc_feature 1..20: note = Description of Artificial Sequence: Synthetic oligonucleotide
  source 1..20: mol_type = other RNA
tttttgccatgggatttctg

SEQ ID NO: 1143 - RNA, 20 nt, synthetic construct
  misc_feature 1..20: note = Description of Artificial Sequence: Synthetic oligonucleotide
  source 1..20: mol_type = other RNA
ccgtttcacttttttgccat

SEQ ID NO: 1144 - RNA, 20 nt, synthetic construct
  misc_feature 1..20: note = Description of Artificial Sequence: Synthetic oligonucleotide
  source 1..20: mol_type = other RNA
cccgtttcacttttttgcca

SEQ ID NO: 1145 - RNA, 20 nt, synthetic construct
  misc_feature 1..20: note = Description of Artificial Sequence: Synthetic oligonucleotide
  source 1..20: mol_type = other RNA
gaagtttcatgtggctcagc

SEQ ID NO: 1146 - RNA, 20 nt, synthetic construct
  misc_feature 1..20: note = Description of Artificial Sequence: Synthetic oligonucleotide
  source 1..20: mol_type = other RNA
gtgggctctgaagtttcatg

SEQ ID NO: 1147 - RNA, 20 nt, synthetic construct
  misc_feature 1..20: note = Description of Artificial Sequence: Synthetic oligonucleotide
  source 1..20: mol_type = other RNA
ttgatgaaacgcaggtaagt

SEQ ID NO: 1148 - RNA, 20 nt, synthetic construct
  misc_feature 1..20: note = Description of Artificial Sequence: Synthetic oligonucleotide
  source 1..20: mol_type = other RNA
cttgatgaaacgcaggtaag

SEQ ID NO: 1149 - RNA, 20 nt, synthetic construct
  misc_feature 1..20: note = Description of Artificial Sequence: Synthetic oligonucleotide
  source 1..20: mol_type = other RNA
caagagacttgatgaaacgc

SEQ ID NO: 1150 - RNA, 20 nt, synthetic construct
  misc_feature 1..20: note = Description of Artificial Sequence: Synthetic oligonucleotide
  source 1..20: mol_type = other RNA
ggtcacggacatggtccttt

SEQ ID NO: 1151 - RNA, 20 nt, synthetic construct
  misc_feature 1..20: note = Description of Artificial Sequence: Synthetic oligonucleotide
  source 1..20: mol_type = other RNA
ggagtctgtggtcacggaca

SEQ ID NO: 1152 - RNA, 20 nt, synthetic construct
  misc_feature 1..20: note = Description of Artificial Sequence: Synthetic oligonucleotide
  source 1..20: mol_type = other RNA
tactgtggagtctgtggtca

SEQ ID NO: 1153 - RNA, 20 nt, synthetic construct
  misc_feature 1..20: note = Description of Artificial Sequence: Synthetic oligonucleotide
  source 1..20: mol_type = other RNA
tgtagttactgtggagtctg

SEQ ID NO: 1154 - RNA, 20 nt, synthetic construct
  misc_feature 1..20: note = Description of Artificial Sequence: Synthetic oligonucleotide
  source 1..20: mol_type = other RNA
atatggagatgtagttactg

SEQ ID NO: 1155 - RNA, 20 nt, synthetic construct
  misc_feature 1..20: note = Description of Artificial Sequence: Synthetic oligonucleotide
  source 1..20: mol_type = other RNA
gtgacccgagtgaaggcata

SEQ ID NO: 1156 - RNA, 20 nt, synthetic construct
  misc_feature 1..20: note = Description of Artificial Sequence: Synthetic oligonucleotide
  source 1..20: mol_type = other RNA
aggccctgtgacccgagtga

SEQ ID NO: 1157 - RNA, 20 nt, synthetic construct
  misc_feature 1..20: note = Description of Artificial Sequence: Synthetic oligonucleotide
  source 1..20: mol_type = other RNA
tatcatatatatctgttgta

SEQ ID NO: 1158 - RNA, 20 nt, synthetic construct
  misc_feature 1..20: note = Description of Artificial Sequence: Synthetic oligonucleotide
  source 1..20: mol_type = other RNA
gtgaggtaaccaacaaaagg

SEQ ID NO: 1159 - RNA, 20 nt, synthetic construct
  misc_feature 1..20: note = Description of Artificial Sequence: Synthetic oligonucleotide
  source 1..20: mol_type = other RNA
agtgaggtaaccaacaaaag

SEQ ID NO: 1160 - RNA, 20 nt, synthetic construct
  misc_feature 1..20: note = Description of Artificial Sequence: Synthetic oligonucleotide
  source 1..20: mol_type = other RNA
aagtgaggtaaccaacaaaa

SEQ ID NO: 1161 - RNA, 20 nt, synthetic construct
  misc_feature 1..20: note = Description of Artificial Sequence: Synthetic oligonucleotide
  source 1..20: mol_type = other RNA
caagtgaggtaaccaacaaa

SEQ ID NO: 1162 - RNA, 20 nt, synthetic construct
  misc_feature 1..20: note = Description of Artificial Sequence: Synthetic oligonucleotide
  source 1..20: mol_type = other RNA
ggttgtggtcttttcaagtg

SEQ ID NO: 1163 - RNA, 20 nt, synthetic construct
  misc_feature 1..20: note = Description of Artificial Sequence: Synthetic oligonucleotide
  source 1..20: mol_type = other RNA
tactactgacaggttggttg

SEQ ID NO: 1164 - RNA, 20 nt, synthetic construct
  misc_feature 1..20: note = Description of Artificial Sequence: Synthetic oligonucleotide
  source 1..20: mol_type = other RNA
gaactatactactgacaggt

SEQ ID NO: 1165 - RNA, 20 nt, synthetic construct
  misc_feature 1..20: note = Description of Artificial Sequence: Synthetic oligonucleotide
  source 1..20: mol_type = other RNA
atgagaactatactactgac

SEQ ID NO: 1166 - RNA, 20 nt, synthetic construct
  misc_feature 1..20: note = Description of Artificial Sequence: Synthetic oligonucleotide
  source 1..20: mol_type = other RNA
cttttgttgctggtgagctg

SEQ ID NO: 1167 - RNA, 20 nt, synthetic construct
  misc_feature 1..20: note = Description of Artificial Sequence: Synthetic oligonucleotide
  source 1..20: mol_type = other RNA
aagataacctcttttgttgc

SEQ ID NO: 1168 - RNA, 20 nt, synthetic construct
  misc_feature 1..20: note = Description of Artificial Sequence: Synthetic oligonucleotide
  source 1..20: mol_type = other RNA
ccagtgaaaattaagtgcta

SEQ ID NO: 1169 - RNA, 20 nt, synthetic construct
  misc_feature 1..20: note = Description of Artificial Sequence: Synthetic oligonucleotide
  source 1..20: mol_type = other RNA
gatgccatctgtgaccactt

SEQ ID NO: 1170 - RNA, 20 nt, synthetic construct
  misc_feature 1..20: note = Description of Artificial Sequence: Synthetic oligonucleotide
  source 1..20: mol_type = other RNA
agatgccatctgtgaccact

SEQ ID NO: 1171 - RNA, 20 nt, synthetic construct
  misc_feature 1..20: note = Description of Artificial Sequence: Synthetic oligonucleotide
  source 1..20: mol_type = other RNA
tctttttgcatagaatgctt

SEQ ID NO: 1172 - RNA, 20 nt, synthetic construct
  misc_feature 1..20: note = Description of Artificial Sequence: Synthetic oligonucleotide
  source 1..20: mol_type = other RNA
gtgtttaaaaatgtaaattg

SEQ ID NO: 1173 - RNA, 20 nt, synthetic construct
  misc_feature 1..20: note = Description of Artificial Sequence: Synthetic oligonucleotide
  source 1..20: mol_type = other RNA
agagttgtaagcgggggggg

SEQ ID NO: 1174 - RNA, 20 nt, synthetic construct
  misc_feature 1..20: note = Description of Artificial Sequence: Synthetic oligonucleotide
  source 1..20: mol_type = other RNA
tagagttgtaagcggggggg

SEQ ID NO: 1175 - RNA, 20 nt, synthetic construct
  misc_feature 1..20: note = Description of Artificial Sequence: Synthetic oligonucleotide
  source 1..20: mol_type = other RNA
gtagagttgtaagcgggggg

SEQ ID NO: 1176 - RNA, 20 nt, synthetic construct
  misc_feature 1..20: note = Description of Artificial Sequence: Synthetic oligonucleotide
  source 1..20: mol_type = other RNA
tgtagagttgtaagcggggg

SEQ ID NO: 1177 - RNA, 20 nt, synthetic construct
  misc_feature 1..20: note = Description of Artificial Sequence: Synthetic oligonucleotide
  source 1..20: mol_type = other RNA
gtgtagagttgtaagcgggg

SEQ ID NO: 1178 - RNA, 20 nt, synthetic construct
  misc_feature 1..20: note = Description of Artificial Sequence: Synthetic oligonucleotide
  source 1..20: mol_type = other RNA
tgtgtagagttgtaagcggg

SEQ ID NO: 1179 - RNA, 20 nt, synthetic construct
  misc_feature 1..20: note = Description of Artificial Sequence: Synthetic oligonucleotide
  source 1..20: mol_type = other RNA
atgtgtagagttgtaagcgg

SEQ ID NO: 1180 - RNA, 20 nt, synthetic construct
  misc_feature 1..20: note = Description of Artificial Sequence: Synthetic oligonucleotide
  source 1..20: mol_type = other RNA
gatgtgtagagttgtaagcg

SEQ ID NO: 1181 - RNA, 20 nt, synthetic construct
  misc_feature 1..20: note = Description of Artificial Sequence: Synthetic oligonucleotide
  source 1..20: mol_type = other RNA
agatgtgtagagttgtaagc

SEQ ID NO: 1182 - RNA, 20 nt, synthetic construct
  misc_feature 1..20: note = Description of Artificial Sequence: Synthetic oligonucleotide
  source 1..20: mol_type = other RNA
cagatgtgtagagttgtaag

SEQ ID NO: 1183 - RNA, 20 nt, synthetic construct
  misc_feature 1..20: note = Description of Artificial Sequence: Synthetic oligonucleotide
  source 1..20: mol_type = other RNA
aaacttgatattattaaaag

SEQ ID NO: 1184 - RNA, 20 nt, synthetic construct
  misc_feature 1..20: note = Description of Artificial Sequence: Synthetic oligonucleotide
  source 1..20: mol_type = other RNA
atcatatattcagcaccaga

SEQ ID NO: 1185 - RNA, 20 nt, synthetic construct
  misc_feature 1..20: note = Description of Artificial Sequence: Synthetic oligonucleotide
  source 1..20: mol_type = other RNA
atagcatcttgatgatataa

SEQ ID NO: 1186 - RNA, 20 nt, synthetic construct
  misc_feature 1..20: note = Description of Artificial Sequence: Synthetic oligonucleotide
  source 1..20: mol_type = other RNA
cccctattattcaagggcac

SEQ ID NO: 1187 - RNA, 20 nt, synthetic construct
  misc_feature 1..20: note = Description of Artificial Sequence: Synthetic oligonucleotide
  source 1..20: mol_type = other RNA
aaggtacccctattattcaa

SEQ ID NO: 1188 - RNA, 20 nt, synthetic construct
  misc_feature 1..20: note = Description of Artificial Sequence: Synthetic oligonucleotide
  source 1..20: mol_type = other RNA
aaaggtacccctattattca

SEQ ID NO: 1189 - RNA, 20 nt, synthetic construct
  misc_feature 1..20: note = Description of Artificial Sequence: Synthetic oligonucleotide
  source 1..20: mol_type = other RNA
tgataaaaacttgaatgaaa

SEQ ID NO: 1190 - RNA, 20 nt, synthetic construct
  misc_feature 1..20: note = Description of Artificial Sequence: Synthetic oligonucleotide
  source 1..20: mol_type = other RNA
aactaagcttgtgtaagaat

SEQ ID NO: 1191 - RNA, 20 nt, synthetic construct
  misc_feature 1..20: note = Description of Artificial Sequence: Synthetic oligonucleotide
  source 1..20: mol_type = other RNA
actggatgagcaaaatccag

SEQ ID NO: 1192 - RNA, 20 nt, synthetic construct
  misc_feature 1..20: note = Description of Artificial Sequence: Synthetic oligonucleotide
  source 1..20: mol_type = other RNA
ttgtcctacaaggacttcac

SEQ ID NO: 1193 - RNA, 20 nt, synthetic construct
  misc_feature 1..20: note = Description of Artificial Sequence: Synthetic oligonucleotide
  source 1..20: mol_type = other RNA
atatcgtttattgtcctaca

SEQ ID NO: 1194 - RNA, 20 nt, synthetic construct
  misc_feature 1..20: note = Description of Artificial Sequence: Synthetic oligonucleotide
  source 1..20: mol_type = other RNA
tgttcaagttgtcaaagctt

SEQ ID NO: 1195 - RNA, 20 nt, synthetic construct
  misc_feature 1..20: note = Description of Artificial Sequence: Synthetic oligonucleotide
  source 1..20: mol_type = other RNA
attgctcatcagcagatgca

SEQ ID NO: 1196 - RNA, 20 nt, synthetic construct
  misc_feature 1..20: note = Description of Artificial Sequence: Synthetic oligonucleotide
  source 1..20: mol_type = other RNA
ttaactggctgtgttaaaaa

SEQ ID NO: 1197 - RNA, 20 nt, synthetic construct
  misc_feature 1..20: note = Description of Artificial Sequence: Synthetic oligonucleotide
  source 1..20: mol_type = other RNA
agccccatggtggatttaac

SEQ ID NO: 1198 - RNA, 20 nt, synthetic construct
  misc_feature 1..20: note = Description of Artificial Sequence: Synthetic oligonucleotide
  source 1..20: mol_type = other RNA
gaatccagtaagccccatgg

SEQ ID NO: 1199 - RNA, 20 nt, synthetic construct
  misc_feature 1..20: note = Description of Artificial Sequence: Synthetic oligonucleotide
  source 1..20: mol_type = other RNA
cttgaatccagtaagcccca

SEQ ID NO: 1200 - RNA, 20 nt, synthetic construct
  misc_feature 1..20: note = Description of Artificial Sequence: Synthetic oligonucleotide
  source 1..20: mol_type = other RNA
gcaccagaaaacatgttttg

SEQ ID NO: 1201 - RNA, 20 nt, synthetic construct
  misc_feature 1..20: note = Description of Artificial Sequence: Synthetic oligonucleotide
  source 1..20: mol_type = other RNA
tatgatccataaaatagcat

SEQ ID NO: 1202 - RNA, 20 nt, synthetic construct
  misc_feature 1..20: note = Description of Artificial Sequence: Synthetic oligonucleotide
  source 1..20: mol_type = other RNA
gtacataattatcaacacaa

SEQ ID NO: 1203 - RNA, 20 nt, synthetic construct
  misc_feature 1..20: note = Description of Artificial Sequence: Synthetic oligonucleotide
  source 1..20: mol_type = other RNA
gctcaatcctcttgttaaag

SEQ ID NO: 1204 - RNA, 20 nt, synthetic construct
  misc_feature 1..20: note = Description of Artificial Sequence: Synthetic oligonucleotide
  source 1..20: mol_type = other RNA
cctgtttattcatcttatgc

SEQ ID NO: 1205 - RNA, 20 nt, synthetic construct
  misc_feature 1..20: note = Description of Artificial Sequence: Synthetic oligonucleotide
  source 1..20: mol_type = other RNA
ttttaactgacagattcaca

SEQ ID NO: 1206 - RNA, 20 nt, synthetic construct
  misc_feature 1..20: note = Description of Artificial Sequence: Synthetic oligonucleotide
  source 1..20: mol_type = other RNA
cattatgatatatttgtagc

SEQ ID NO: 1207 - RNA, 20 nt, synthetic construct
  misc_feature 1..20: note = Description of Artificial Sequence: Synthetic oligonucleotide
  source 1..20: mol_type = other RNA
tgttgaggtatatgacaagt

SEQ ID NO: 1208 - RNA, 20 nt, synthetic construct
  misc_feature 1..20: note = Description of Artificial Sequence: Synthetic oligonucleotide
  source 1..20: mol_type = other RNA
ctattgccaaactagtgttg

SEQ ID NO: 1209 - RNA, 20 nt, synthetic construct
  misc_feature 1..20: note = Description of Artificial Sequence: Synthetic oligonucleotide
  source 1..20: mol_type = other RNA
aaggacttggaaaaaaatga

SEQ ID NO: 1210 - RNA, 20 nt, synthetic construct
  misc_feature 1..20: note = Description of Artificial Sequence: Synthetic oligonucleotide
  source 1..20: mol_type = other RNA
taacaataaaaaaaaggact

SEQ ID NO: 1211 - RNA, 20 nt, synthetic construct
  misc_feature 1..20: note = Description of Artificial Sequence: Synthetic oligonucleotide
  source 1..20: mol_type = other RNA
tttttttaacaataaaaaaa

SEQ ID NO: 1212 - RNA, 20 nt, synthetic construct
  misc_feature 1..20: note = Description of Artificial Sequence: Synthetic oligonucleotide
  source 1..20: mol_type = other RNA
agaaatcaagtattgaaaaa

SEQ ID NO: 1213 - RNA, 20 nt, synthetic construct
  misc_feature 1..20: note = Description of Artificial Sequence: Synthetic oligonucleotide
  source 1..20: mol_type = other RNA
cctgaatttttagaacaaaa

SEQ ID NO: 1214 - RNA, 20 nt, synthetic construct
  misc_feature 1..20: note = Description of Artificial Sequence: Synthetic oligonucleotide
  source 1..20: mol_type = other RNA
acaggtgacatgttggcata

SEQ ID NO: 1215 - RNA, 20 nt, synthetic construct
  misc_feature 1..20: note = Description of Artificial Sequence: Synthetic oligonucleotide
  source 1..20: mol_type = other RNA
cacaggtgacatgttggcat

SEQ ID NO: 1216 - RNA, 20 nt, synthetic construct
  misc_feature 1..20: note = Description of Artificial Sequence: Synthetic oligonucleotide
  source 1..20: mol_type = other RNA
cataaacacaggtgacatgt

SEQ ID NO: 1217 - RNA, 20 nt, synthetic construct
  misc_feature 1..20: note = Description of Artificial Sequence: Synthetic oligonucleotide
  source 1..20: mol_type = other RNA
caacaattttacataaacac

SEQ ID NO: 1218 - RNA, 20 nt, synthetic construct
  misc_feature 1..20: note = Description of Artificial Sequence: Synthetic oligonucleotide
  source 1..20: mol_type = other RNA
agaagggattcaaaataaaa

SEQ ID NO: 1219 - RNA, 20 nt, synthetic construct
  misc_feature 1..20: note = Description of Artificial Sequence: Synthetic oligonucleotide
  source 1..20: mol_type = other RNA
tagaagggattcaaaataaa

SEQ ID NO: 1220 - RNA, 20 nt, synthetic construct
  misc_feature 1..20: note = Description of Artificial Sequence: Synthetic oligonucleotide
  source 1..20: mol_type = other RNA
catgtacaagtaaaatagaa

SEQ ID NO: 1221 - RNA, 20 nt, synthetic construct
  misc_feature 1..20: note = Description of Artificial Sequence: Synthetic oligonucleotide
  source 1..20: mol_type = other RNA
acatgtacaagtaaaataga

SEQ ID NO: 1222 - RNA, 20 nt, synthetic construct
  misc_feature 1..20: note = Description of Artificial Sequence: Synthetic oligonucleotide
  source 1..20: mol_type = other RNA
gagagttacaagtaagtctc

SEQ ID NO: 1223 - RNA, 20 nt, synthetic construct
  misc_feature 1..20: note = Description of Artificial Sequence: Synthetic oligonucleotide
  source 1..20: mol_type = other RNA
tatgtaccttcagtgattac

SEQ ID NO: 1224 - RNA, 20 nt, synthetic construct
  misc_feature 1..20: note = Description of Artificial Sequence: Synthetic oligonucleotide
  source 1..20: mol_type = other RNA
ctgtttaagggaagtccaca

SEQ ID NO: 1225 - RNA, 20 nt, synthetic construct
  misc_feature 1..20: note = Description of Artificial Sequence: Synthetic oligonucleotide
  source 1..20: mol_type = other RNA
gtaggtgtttgcctgtttaa

SEQ ID NO: 1226 - RNA, 20 nt, synthetic construct
  misc_feature 1..20: note = Description of Artificial Sequence: Synthetic oligonucleotide
  source 1..20: mol_type = other RNA
tgtaggtgtttgcctgttta

SEQ ID NO: 1227 - RNA, 20 nt, synthetic construct
  misc_feature 1..20: note = Description of Artificial Sequence: Synthetic oligonucleotide
  source 1..20: mol_type = other RNA
ctgttgcacaccatacctgt

SEQ ID NO: 1228 - RNA, 20 nt, synthetic construct
  misc_feature 1..20: note = Description of Artificial Sequence: Synthetic oligonucleotide
  source 1..20: mol_type = other RNA
tagtaagcaaaaatgtattt

SEQ ID NO: 1229 - RNA, 20 nt, synthetic construct
  misc_feature 1..20: note = Description of Artificial Sequence: Synthetic oligonucleotide
  source 1..20: mol_type = other RNA
atttgaccaataaaacccaa

SEQ ID NO: 1230 - RNA, 20 nt, synthetic construct
  misc_feature 1..20: note = Description of Artificial Sequence: Synthetic oligonucleotide
  source 1..20: mol_type = other RNA
ttttggaaatgtttgcaaat

SEQ ID NO: 1231 - RNA, 20 nt, synthetic construct
  misc_feature 1..20: note = Description of Artificial Sequence: Synthetic oligonucleotide
  source 1..20: mol_type = other RNA
gtaagcaaagcaaacatttt

SEQ ID NO: 1232 - RNA, 20 nt, synthetic construct
  misc_feature 1..20: note = Description of Artificial Sequence: Synthetic oligonucleotide
  source 1..20: mol_type = other RNA
caaaaaacattaaaatcatg

SEQ ID NO: 1233 - RNA, 20 nt, synthetic construct
  misc_feature 1..20: note = Description of Artificial Sequence: Synthetic oligonucleotide
  source 1..20: mol_type = other RNA
atgtttggggctagatatta

SEQ ID NO: 1234 - RNA, 20 nt, synthetic construct
  misc_feature 1..20: note = Description of Artificial Sequence: Synthetic oligonucleotide
  source 1..20: mol_type = other RNA
atgtagtaatcaaatgtttg

SEQ ID NO: 1235 - RNA, 20 nt, synthetic construct
  misc_feature 1..20: note = Description of Artificial Sequence: Synthetic oligonucleotide
  source 1..20: mol_type = other RNA
catgtagtaatcaaatgttt

SEQ ID NO: 1236 - RNA, 20 nt, synthetic construct
  misc_feature 1..20: note = Description of Artificial Sequence: Synthetic oligonucleotide
  source 1..20: mol_type = other RNA
acatgtagtaatcaaatgtt

SEQ ID NO: 1237 - RNA, 20 nt, synthetic construct
  misc_feature 1..20: note = Description of Artificial Sequence: Synthetic oligonucleotide
  source 1..20: mol_type = other RNA
cagaaatcaaatattaagaa

SEQ ID NO: 1238 - RNA, 20 nt, synthetic construct
  misc_feature 1..20: note = Description of Artificial Sequence: Synthetic oligonucleotide
  source 1..20: mol_type = other RNA
gcagtttaacaaatgacagt

SEQ ID NO: 1239 - RNA, 20 nt, synthetic construct
  misc_feature 1..20: note = Description of Artificial Sequence: Synthetic oligonucleotide
  source 1..20: mol_type = other RNA
actatacttcctgttcttgt

SEQ ID NO: 1240 - RNA, 20 nt, synthetic construct
  misc_feature 1..20: note = Description of Artificial Sequence: Synthetic oligonucleotide
  source 1..20: mol_type = other RNA
ccattcattctaactgaggc

SEQ ID NO: 1241 - RNA, 20 nt, synthetic construct
  misc_feature 1..20: note = Description of Artificial Sequence: Synthetic oligonucleotide
  source 1..20: mol_type = other RNA
ctttccattcattctaactg

SEQ ID NO: 1242 - RNA, 20 nt, synthetic construct
  misc_feature 1..20: note = Description of Artificial Sequence: Synthetic oligonucleotide
  source 1..20: mol_type = other RNA
ctcagaagcattttcaagta

SEQ ID NO: 1243 - RNA, 20 nt, synthetic construct
  misc_feature 1..20: note = Description of Artificial Sequence: Synthetic oligonucleotide
  source 1..20: mol_type = other RNA
aacactcacatagcattatc

SEQ ID NO: 1244 - DNA, 21 bp, synthetic construct
  misc_feature 1..21: note = Description of Artificial Sequence: Synthetic oligonucleotide
  source 1..21: mol_type = other DNA
cacatggcgtttatccagaat

SEQ ID NO: 1245 - DNA, 21 bp, synthetic construct
  misc_feature 1..21: note = Description of Artificial Sequence: Synthetic oligonucleotide
  source 1..21: mol_type = other DNA
cagatgcacaggccaattaag

SEQ ID NO: 1246 - DNA, 21 bp, synthetic construct
  misc_feature 1..21: note = Description of Artificial Sequence: Synthetic oligonucleotide
  source 1..21: mol_type = other DNA
gagctgctgaattcaactaga

SEQ ID NO: 1247 - DNA, 21 bp, synthetic construct
  misc_feature 1..21: note = Description of Artificial Sequence: Synthetic oligonucleotide
  source 1..21: mol_type = other DNA
cagatcgccataacataaata

SEQ ID NO: 1248 - DNA, 21 bp, synthetic construct
  misc_feature 1..21: note = Description of Artificial Sequence: Synthetic oligonucleotide
  source 1..21: mol_type = other DNA
gaccatggagcagcatctgaa

SEQ ID NO: 1249 - DNA, 21 bp, synthetic construct
  misc_feature 1..21: note = Description of Artificial Sequence: Synthetic oligonucleotide
  source 1..21: mol_type = other DNA
gccaagtcattatttgaccat

SEQ ID NO: 1250 - DNA, 21 bp, synthetic construct
  misc_feature 1..21: note = Description of Artificial Sequence: Synthetic oligonucleotide
  source 1..21: mol_type = other DNA
cctcagagatattgtgggttt

SEQ ID NO: 1251 - DNA, 19 bp, synthetic construct
  misc_feature 1..19: note = Description of Artificial Sequence: Synthetic oligonucleotide
  source 1..19: mol_type = other DNA
gggtaagccaagaaagaaa

SEQ ID NO: 1252 - DNA, 19 bp, synthetic construct
  misc_feature 1..19: note = Description of Artificial Sequence: Synthetic oligonucleotide
  source 1..19: mol_type = other DNA
gggtaagccaagaaagaaa

SEQ ID NO: 1253 - DNA, 112 bp, synthetic construct
  misc_feature 1..112: note = Description of Artificial Sequence: Synthetic polynucleotide
  source 1..112: mol_type = other DNA
cacatggcgtttatccagaatctcgagattctggataaacgccatgtgttttttgaattcgcaccagcacgctacgcacacacagtacacacactgacgtttcgccgtcttc

SEQ ID NO: 1254 - DNA, 130 bp, synthetic construct
  misc_feature 1..130: note = Description of Artificial Sequence: Synthetic polynucleotide
  source 1..130: mol_type = other DNA
gaagacgcaccggcagatgtacaggctaattaaggttaatattcatagccttaattggcctgtgcatctgttttttgaattcgcaccagcacgctacgcaacacgtcaaccagtgtcagtgtttcgccgt

SEQ ID NO: 1255 - DNA, 130 bp, synthetic construct
  misc_feature 1..130: note = Description of Artificial Sequence: Synthetic polynucleotide
  source 1..130: mol_type = other DNA
gaagacgcaccgggagctgctgaattcaattagagttaatattcatagctctagttgaattcagcagctcttttttgaattcgcaccagcacgctacgcatgcagtcaaccagtgtcaaccattcgccgt

SEQ ID NO: 1256 - DNA, 112 bp, synthetic construct
  misc_feature 1..112: note = Description of Artificial Sequence: Synthetic polynucleotide
  source 1..112: mol_type = other DNA
cagatcgccataacataaatactcgagtatttatgttatggcgatctgttttttgaattcgcaccagcacgctacgcatgaccagtacacacactgcatgttcgccgtcttc

SEQ ID NO: 1257 - DNA, 130 bp, synthetic construct
  misc_feature 1..130: note = Description of Artificial Sequence: Synthetic polynucleotide
  source 1..130: mol_type = other DNA
gaagacgcaccgggaccatggagtagcatttgaagttaatattcatagcttcagatgctgctccatggtcttttttgaattcgcaccagcacgctacgcatggtgtcaaccagtgtcagttgttcgccgt

SEQ ID NO: 1258 - DNA, 56 bp, synthetic construct
  misc_feature 1..56: note = Description of Artificial Sequence: Synthetic oligonucleotide
  source 1..56: mol_type = other DNA
gccaagtcattatttgaccatctcgagatggtcaaataatgacttggcttttttga

SEQ ID NO: 1259 - DNA, 56 bp, synthetic construct
  misc_feature 1..56: note = Description of Artificial Sequence: Synthetic oligonucleotide
  source 1..56: mol_type = other DNA
cctcagagatattgtgggtttctcgagaaacccacaatatctctgaggttttttga

SEQ ID NO: 1260 - DNA, 52 bp, synthetic construct
  misc_feature 1..52: note = Description of Artificial Sequence: Synthetic oligonucleotide
  source 1..52: mol_type = other DNA
gggtaagccaagaaagaaactcgagtttctttcttggcttacccttttttga

SEQ ID NO: 1261 - DNA, 126 bp, synthetic construct
  misc_feature 1..126: note = Description of Artificial Sequence: Synthetic polynucleotide
  source 1..126: mol_type = other DNA
gaagacgcaccgggggtaagccaagaaagaaagttaatattcatagctttctttcttggcttacccttttttgaattcgcaccagcacgctacgcaacacgtcaaccagtgtcagtgtttcgccgt

SEQ ID NO: 1262 - protein, 4 aa, synthetic construct
  REGION 1..4: note = Description of Artificial Sequence: Synthetic peptide
RGDS

SEQ ID NO: 1263 - DNA, 21 bp, synthetic construct
  misc_feature 1..21: note = Description of Artificial Sequence: Synthetic primer
  source 1..21: mol_type = other DNA
catgtacgttgctatccaggc

SEQ ID NO: 1264 - DNA, 21 bp, synthetic construct
  misc_feature 1..21: note = Description of Artificial Sequence: Synthetic primer
  source 1..21: mol_type = other DNA
ctccttaatgtcacgcacgat

SEQ ID NO: 1265 - DNA, 23 bp, synthetic construct
  misc_feature 1..23: note = Description of Artificial Sequence: Synthetic primer
  source 1..23: mol_type = other DNA
ctcaccatggatgatgatatcgc

SEQ ID NO: 1266 - DNA, 23 bp, synthetic construct
  misc_feature 1..23: note = Description of Artificial Sequence: Synthetic primer
  source 1..23: mol_type = other DNA
ccacataggaatccttctgaccc

SEQ ID NO: 1267 - DNA, 20 bp, synthetic construct
  misc_feature 1..20: note = Description of Artificial Sequence: Synthetic primer
  source 1..20: mol_type = other DNA
cagaacctaaaccacccgtg

SEQ ID NO: 1268 - DNA, 21 bp, synthetic construct
  misc_feature 1..21: note = Description of Artificial Sequence: Synthetic primer
  source 1..21: mol_type = other DNA
tgcttcgtagcgccattgtaa

SEQ ID NO: 1269 - DNA, 22 bp, synthetic construct
  misc_feature 1..22: note = Description of Artificial Sequence: Synthetic primer
  source 1..22: mol_type = other DNA
ataccctgtatgaagggaagcc

SEQ ID NO: 1270 - DNA, 23 bp, synthetic construct
  misc_feature 1..23: note = Description of Artificial Sequence: Synthetic primer
  source 1..23: mol_type = other DNA
cttaccccgaagttacgtctttc

SEQ ID NO: 1271 - DNA, 21 bp, synthetic construct
  misc_feature 1..21: note = Description of Artificial Sequence: Synthetic primer
  source 1..21: mol_type = other DNA
cacccggctctatgaaacctt

SEQ ID NO: 1272 - DNA, 20 bp, synthetic construct
  misc_feature 1..20: note = Description of Artificial Sequence: Synthetic primer
  source 1..20: mol_type = other DNA
ccagccactcgaggtagtca

SEQ ID NO: 1273 - RNA, 20 nt, synthetic construct
  misc_feature 1..20: note = Description of Artificial Sequence: Synthetic oligonucleotide
  source 1..20: mol_type = other RNA
cagagcaccagagtgccgtc

SEQ ID NO: 1274 - RNA, 20 nt, synthetic construct
  misc_feature 1..20: note = Description of Artificial Sequence: Synthetic oligonucleotide
  source 1..20: mol_type = other RNA
agagcaccagagtgccgtct

SEQ ID NO: 1275 - RNA, 20 nt, synthetic construct
  misc_feature 1..20: note = Description of Artificial Sequence: Synthetic oligonucleotide
  source 1..20: mol_type = other RNA
ttcagacccagacggcactc

SEQ ID NO: 1276 - RNA, 20 nt, synthetic construct
  misc_feature 1..20: note = Description of Artificial Sequence: Synthetic oligonucleotide
  source 1..20: mol_type = other RNA
atggcagcacattggtaagt

SEQ ID NO: 1277 - RNA, 20 nt, synthetic construct
  misc_feature 1..20: note = Description of Artificial Sequence: Synthetic oligonucleotide
  source 1..20: mol_type = other RNA
cacattggtaagttgggctg

SEQ ID NO: 1278 - RNA, 20 nt, synthetic construct
  misc_feature 1..20: note = Description of Artificial Sequence: Synthetic oligonucleotide
  source 1..20: mol_type = other RNA
gacttgcacaacatgcagaa

SEQ ID NO: 1279 - RNA, 20 nt, synthetic construct
  misc_feature 1..20: note = Description of Artificial Sequence: Synthetic oligonucleotide
  source 1..20: mol_type = other RNA
tcatggagcatgtactacaa

SEQ ID NO: 1280 - RNA, 20 nt, synthetic construct
  misc_feature 1..20: note = Description of Artificial Sequence: Synthetic oligonucleotide
  source 1..20: mol_type = other RNA
aacttgcgcctgtcaggggc

SEQ ID NO: 1281 - RNA, 20 nt, synthetic construct
  misc_feature 1..20: note = Description of Artificial Sequence: Synthetic oligonucleotide
  source 1..20: mol_type = other RNA
ccaaggaagtttaagctgct

SEQ ID NO: 1282 - RNA, 20 nt, synthetic construct
  misc_feature 1..20: note = Description of Artificial Sequence: Synthetic oligonucleotide
  source 1..20: mol_type = other RNA
ccaagcagcttaaacttcct

SEQ ID NO: 1283 - RNA, 20 nt, synthetic construct
  misc_feature 1..20: note = Description of Artificial Sequence: Synthetic oligonucleotide
  source 1..20: mol_type = other RNA
ttggtgccataagagtggac

SEQ ID NO: 1284 - RNA, 20 nt, synthetic construct
  misc_feature 1..20: note = Description of Artificial Sequence: Synthetic oligonucleotide
  source 1..20: mol_type = other RNA
gcaaaacctgtccactctta

SEQ ID NO: 1285 - RNA, 20 nt, synthetic construct
  misc_feature 1..20: note = Description of Artificial Sequence: Synthetic oligonucleotide
  source 1..20: mol_type = other RNA
atatgttggtgccataagag

SEQ ID NO: 1286 - RNA, 20 nt, synthetic construct
  misc_feature 1..20: note = Description of Artificial Sequence: Synthetic oligonucleotide
  source 1..20: mol_type = other RNA
aaaacggagtggtgccattc

SEQ ID NO: 1287 - RNA, 20 nt, synthetic construct
  misc_feature 1..20: note = Description of Artificial Sequence: Synthetic oligonucleotide
  source 1..20: mol_type = other RNA
gtctctgacgtggatgagtt

SEQ ID NO: 1288 - RNA, 20 nt, synthetic construct
  misc_feature 1..20: note = Description of Artificial Sequence: Synthetic oligonucleotide
  source 1..20: mol_type = other RNA
tttatacaaagtctctgacg

SEQ ID NO: 1289 - RNA, 20 nt, synthetic construct
  misc_feature 1..20: note = Description of Artificial Sequence: Synthetic oligonucleotide
  source 1..20: mol_type = other RNA
agagaagacaatcgagaatt

SEQ ID NO: 1290 - RNA, 20 nt, synthetic construct
  misc_feature 1..20: note = Description of Artificial Sequence: Synthetic oligonucleotide
  source 1..20: mol_type = other RNA
acgtcagagactttgtataa

SEQ ID NO: 1291 - RNA, 20 nt, synthetic construct
  misc_feature 1..20: note = Description of Artificial Sequence: Synthetic oligonucleotide
  source 1..20: mol_type = other RNA
ggatagaaccaaccatgttg

SEQ ID NO: 1292 - RNA, 20 nt, synthetic construct
  misc_feature 1..20: note = Description of Artificial Sequence: Synthetic oligonucleotide
  source 1..20: mol_type = other RNA
ttgtagccagaggttctgtc

SEQ ID NO: 1293 - RNA, 20 nt, synthetic construct
  misc_feature 1..20: note = Description of Artificial Sequence: Synthetic oligonucleotide
  source 1..20: mol_type = other RNA
tctgttgccctcaacatggt

SEQ ID NO: 1294 - RNA, 20 nt, synthetic construct
  misc_feature 1..20: note = Description of Artificial Sequence: Synthetic oligonucleotide
  source 1..20: mol_type = other RNA
gatagaaccaaccatgttga

SEQ ID NO: 1295 - RNA, 20 nt, synthetic construct
  misc_feature 1..20: note = Description of Artificial Sequence: Synthetic oligonucleotide
  source 1..20: mol_type = other RNA
ttctggagctttgtagccag

SEQ ID NO: 1296 - RNA, 73 nt, synthetic construct
  misc_feature 1..73: note = Description of Artificial Sequence: Synthetic oligonucleotide
  source 1..73: mol_type = other RNA
aacagcatagcaagttaaaataaggctagtccgttatcaacttgaaaaagtggcaccgagtcggtgttttttt

SEQ ID NO: 1297 - protein, 13 aa, synthetic construct
  REGION 1..13: note = Description of Artificial Sequence: Synthetic peptide
CLVGANRDDKIIF

SEQ ID NO: 1298 - protein, 18 aa, synthetic construct
  REGION 1..18: note = Description of Artificial Sequence: Synthetic peptide
CASSLDGSGQGSDYGYTF

SEQ ID NO: 1299 - DNA, 41 bp, synthetic construct
  misc_feature 1..41: note = Description of Artificial Sequence: Synthetic oligonucleotide
  source 1..41: mol_type = other DNA
tgtgcagcaagtagggaggcgacaccgacaagctcatcttt

SEQ ID NO: 1300 - DNA, 39 bp, synthetic construct
  misc_feature 1..39: note = Description of Artificial Sequence: Synthetic oligonucleotide
  source 1..39: mol_type = other DNA
tgcctcgtgggtgcgaacagagatgacaagatcatcttt

SEQ ID NO: 1301 - DNA, 46 bp, synthetic construct
  misc_feature 1..46: note = Description of Artificial Sequence: Synthetic oligonucleotide
  source 1..46: mol_type = other DNA
gcgccagcagcttggacggttcgggacagggatcggactatggcta

SEQ ID NO: 1302 - DNA, 51 bp, synthetic construct
  misc_feature 1..51: note = Description of Artificial Sequence: Synthetic oligonucleotide
  source 1..51: mol_type = other DNA
aagcaagcctgatggaacagactaagtccattcctgataccatcacctccc

SEQ ID NO: 1303 - DNA, 65 bp, synthetic construct
  misc_feature 1..65: note = Description of Artificial Sequence: Synthetic oligonucleotide
  source 1..65: mol_type = other DNA
aagcaagcctgatggaacaggatagaaccaacagactaagtccattcctgataccatcacctccc

SEQ ID NO: 1304 - DNA, 78 bp, synthetic construct
  misc_feature 1..78: note = Description of Artificial Sequence: Synthetic oligonucleotide
  source 1..78: mol_type = other DNA
aagcaagcctgatggaacaggatagaaccaaccattgagggcaacagactaagtccattcctgataccatcacctccc

SEQ ID NO: 1305 - DNA, 77 bp, synthetic construct
  misc_feature 1..77: note = Description of Artificial Sequence: Synthetic oligonucleotide
  source 1..77: mol_type = other DNA
aagcaagcctgatggaacaggatagaaccaaccatgagggcaacagactaagtccattcctgataccatcacctccc

SEQ ID NO: 1306 - DNA, 61 bp, synthetic construct
  misc_feature 1..61: note = Description of Artificial Sequence: Synthetic oligonucleotide
  source 1..61: mol_type = other DNA
aagcaagcctgatggaacaggatagaacagactaagtccattcctgataccatcacctccc

SEQ ID NO: 1307 - DNA, 80 bp, synthetic construct
  misc_feature 1..80: note = Description of Artificial Sequence: Synthetic oligonucleotide
  source 1..80: mol_type = other DNA
actaagtccattcctgataccatcacctcccatttgccagacagaacgtctggctacaaagctccagaatggaagcccac

SEQ ID NO: 1308 - DNA, 79 bp, synthetic construct
  misc_feature 1..79: note = Description of Artificial Sequence: Synthetic oligonucleotide
  source 1..79: mol_type = other DNA
actaagtccattcctgataccatcacctcccatttgccagacaagaacctctggctacaaagctccagaatggaagccc

SEQ ID NO: 1309 - DNA, 79 bp, synthetic construct
  misc_feature 1..79: note = Description of Artificial Sequence: Synthetic oligonucleotide
  source 1..79: mol_type = other DNA
actaagtccattcctgataccatcacctcccatttgccagacaagaacgtctggctacaaagctccagaatggaagccc

SEQ ID NO: 1310 - DNA, 70 bp, synthetic construct
  misc_feature 1..70: note = Description of Artificial Sequence: Synthetic oligonucleotide
  source 1..70: mol_type = other DNA
actaagtccattcctgataccatcacctcccatttgcctctggctacaaagctccagaatggaagcccac

SEQ ID NO: 1311 - DNA, 75 bp, synthetic construct
  misc_feature 1..75: note = Description of Artificial Sequence: Synthetic oligonucleotide
  source 1..75: mol_type = other DNA
actaagtccattcctgataccatcacctcccatttgccagacctctggctacaaagctccagaatggaagcccac

SEQ ID NO: 1312 - DNA, 79 bp, synthetic construct
  misc_feature 1..79: note = Description of Artificial Sequence: Synthetic oligonucleotide
  source 1..79: mol_type = other DNA
atggccccgaagcaagcctgatggaacaggatagaaccaaccaatgttgagggcaacagactaagtccattcctgatac

SEQ ID NO: 1313 - DNA, 79 bp, synthetic construct
  misc_feature 1..79: note = Description of Artificial Sequence: Synthetic oligonucleotide
  source 1..79: mol_type = other DNA
atggccccgaagcaagcctgatggaacaggatagaaccaacctgttgagggcaacagactaagtccattcctgatacca

SEQ ID NO: 1314 - DNA, 51 bp, synthetic construct
  misc_feature 1..51: note = Description of Artificial Sequence: Synthetic oligonucleotide
  source 1..51: mol_type = other DNA
atggccccgaagcaagcctgatggaacagactaagtccattcctgatacca

SEQ ID NO: 1315 - DNA, 78 bp, synthetic construct
  misc_feature 1..78: note = Description of Artificial Sequence: Synthetic oligonucleotide
  source 1..78: mol_type = other DNA
atggccccgaagcaagcctgatggaacaggatagaaccaaccgttgagggcaacagactaagtccattcctgatacca

SEQ ID NO: 1316 - DNA, 65 bp, synthetic construct
  misc_feature 1..65: note = Description of Artificial Sequence: Synthetic oligonucleotide
  source 1..65: mol_type = other DNA
atggccccgaagcaagcctgatggaacaggatagaaccaacagactaagtccattcctgatacca

SEQ ID NO: 1317 - DNA, 79 bp, synthetic construct
  misc_feature 1..79: note = Description of Artificial Sequence: Synthetic oligonucleotide
  source 1..79: mol_type = other DNA
agcaagcctgatggaacaggatagaaccaaccatgtttgagggcaacagactaagtccattcctgataccatcacctcc

SEQ ID NO: 1318 - DNA, 79 bp, synthetic construct
  misc_feature 1..79: note = Description of Artificial Sequence: Synthetic oligonucleotide
  source 1..79: mol_type = other DNA
agcaagcctgatggaacaggatagaaccaaccatgtgagggcaacagactaagtccattcctgataccatcacctccca

SEQ ID NO: 1319 - DNA, 51 bp, synthetic construct
  misc_feature 1..51: note = Description of Artificial Sequence: Synthetic oligonucleotide
  source 1..51: mol_type = other DNA
agcaagcctgatggaacagactaagtccattcctgataccatcacctccca

SEQ ID NO: 1320 - DNA, 65 bp, synthetic construct
  misc_feature 1..65: note = Description of Artificial Sequence: Synthetic oligonucleotide
  source 1..65: mol_type = other DNA
agcaagcctgatggaacaggatagaaccaacagactaagtccattcctgataccatcacctccca

SEQ ID NO: 1321 - DNA, 77 bp, synthetic construct
  misc_feature 1..77: note = Description of Artificial Sequence: Synthetic oligonucleotide
  source 1..77: mol_type = other DNA
agcaagcctgatggaacaggatagaaccaaccatgagggcaacagactaagtccattcctgataccatcacctccca

SEQ ID NO: 1322 - DNA, 80 bp, synthetic construct
  misc_feature 1..80: note = Description of Artificial Sequence: Synthetic oligonucleotide
  source 1..80: mol_type = other DNA
ttcctgataccatcacctcccatttgccagacagaacgtctggctacaaagctccagaatggaagcccactgcctgagag

SEQ ID NO: 1323 - DNA, 79 bp, synthetic construct
  misc_feature 1..79: note = Description of Artificial Sequence: Synthetic oligonucleotide
  source 1..79: mol_type = other DNA
ttcctgataccatcacctcccatttgccagacagaacctctgggctacaaagctccagaatggaagcccactgcctgag

SEQ ID NO: 1324 - DNA, 79 bp, synthetic construct
  misc_feature 1..79: note = Description of Artificial Sequence: Synthetic oligonucleotide
  source 1..79: mol_type = other DNA
ttcctgataccatcacctcccatttgccagacagaacctctgctacaaagctccagaatggaagcccactgcctgagag

SEQ ID NO: 1325 - DNA, 57 bp, synthetic construct
  misc_feature 1..57: note = Description of Artificial Sequence: Synthetic oligonucleotide
  source 1..57: mol_type = other DNA
ttcctgataccatcacctcccatttgccagacagaatggaagcccactgcctgagag

SEQ ID NO: 1326 - DNA, 66 bp, synthetic construct
  misc_feature 1..66: note = Description of Artificial Sequence: Synthetic oligonucleotide
  source 1..66: mol_type = other DNA
ttcctgataccatcacctcccatttgccagacagaacctccagaatggaagcccactgcctgagag

SEQ ID NO: 1327 - DNA, 79 bp, synthetic construct
  misc_feature 1..79: note = Description of Artificial Sequence: Synthetic oligonucleotide
  source 1..79: mol_type = other DNA
ttcagattgaatatgaacacagagcaccagagtgcgtctgggtctgaaggaaggccgtccattctcaggggtcactgca

SEQ ID NO: 1328 - DNA, 79 bp, synthetic construct
  misc_feature 1..79: note = Description of Artificial Sequence: Synthetic oligonucleotide
  source 1..79: mol_type = other DNA
ttcagattgaatatgaacacagagcaccagagtgcccgtctgggtctgaaggaaggccgtccattctcaggggtcactg

SEQ ID NO: 1329 - DNA, 80 bp, synthetic construct
  misc_feature 1..80: note = Description of Artificial Sequence: Synthetic oligonucleotide
  source 1..80: mol_type = other DNA
ttcagattgaatatgaacacagagcaccagagtgccgtctgggtccgaaggaaggccgtccattctcaggggtcactgca

SEQ ID NO: 1330 - DNA, 80 bp, synthetic construct
  misc_feature 1..80: note = Description of Artificial Sequence: Synthetic oligonucleotide
  source 1..80: mol_type = other DNA
ttcagattgaatatgagcacagagcaccagagtgccgtctgggtctgaaggaaggccgtccattctcaggggtcactgca

SEQ ID NO: 1331 - DNA, 80 bp, synthetic construct
  misc_feature 1..80: note = Description of Artificial Sequence: Synthetic oligonucleotide
  source 1..80: mol_type = other DNA
ttcagattgaatatgaacacagagcaccagagtgccgtctgggtctgaaggagggccgtccattctcaggggtcactgca

SEQ ID NO: 1332 - DNA, 79 bp, synthetic construct
  misc_feature 1..79: note = Description of Artificial Sequence: Synthetic oligonucleotide
  source 1..79: mol_type = other DNA
tcagattgaatatgaacacagagcaccagagtgcctctgggtctgaaggaaggccgtccattctcaggggtcactgcat

SEQ ID NO: 1333 - DNA, 73 bp, synthetic construct
  misc_feature 1..73: note = Description of Artificial Sequence: Synthetic oligonucleotide
  source 1..73: mol_type = other DNA
tcagattgaatatgaacacagagcaccagagtgggtctgaaggaaggccgtccattctcaggggtcactgcat

SEQ ID NO: 1334 - DNA, 69 bp, synthetic construct
  misc_feature 1..69: note = Description of Artificial Sequence: Synthetic oligonucleotide
  source 1..69: mol_type = other DNA
tcagattgaatatgaacacagagcaccagagtctgaaggaaggccgtccattctcaggggtcactgcat

SEQ ID NO: 1335 - DNA, 76 bp, synthetic construct
  misc_feature 1..76: note = Description of Artificial Sequence: Synthetic oligonucleotide
  source 1..76: mol_type = other DNA
tcagattgaatatgaacacagagcaccagagtgctgggtctgaaggaaggccgtccattctcaggggtcactgcat

SEQ ID NO: 1336 - DNA, 70 bp, synthetic construct
  misc_feature 1..70: note = Description of Artificial Sequence: Synthetic oligonucleotide
  source 1..70: mol_type = other DNA
tcagattgaatatgaacacagagcaccagagtgctgaaggaaggccgtccattctcaggggtcactgcat

SEQ ID NO: 1337 - DNA, 72 bp, synthetic construct
  misc_feature 1..72: note = Description of Artificial Sequence: Synthetic oligonucleotide
  source 1..72: mol_type = other DNA
acttttatttttcagattgaatatgaacacagagcaccgtctgggtctgaaggaaggccgtccattctcagg

SEQ ID NO: 1338 - DNA, 79 bp, synthetic construct
  misc_feature 1..79: note = Description of Artificial Sequence: Synthetic oligonucleotide
  source 1..79: mol_type = other DNA
acttttatttttcagattgaatatgaacacagagcaccagagttgccgtctgggtctgaaggaaggccgtccattctca

SEQ ID NO: 1339 - DNA, 70 bp, synthetic construct
  misc_feature 1..70: note = Description of Artificial Sequence: Synthetic oligonucleotide
  source 1..70: mol_type = other DNA
acttttatttttcagattgaatatgaacacagagccgtctgggtctgaaggaaggccgtccattctcagg

SEQ ID NO: 1340 - DNA, 78 bp, synthetic construct
  misc_feature 1..78: note = Description of Artificial Sequence: Synthetic oligonucleotide
  source 1..78: mol_type = other DNA
acttttatttttcagattgaatatgaacacagagcaccagagccgtctgggtctgaaggaaggccgtccattctcagg

SEQ ID NO: 1341 - DNA, 78 bp, synthetic construct
  misc_feature 1..78: note = Description of Artificial Sequence: Synthetic oligonucleotide
  source 1..78: mol_type = other DNA
acttttatttttcagattgaatatgaacacagagcaccagtgccgtctgggtctgaaggaaggccgtccattctcagg

SEQ ID NO: 1342 - DNA, 72 bp, synthetic construct
  misc_feature 1..72: note = Description of Artificial Sequence: Synthetic oligonucleotide
  source 1..72: mol_type = other DNA
gacttgcacaacatgcagaatggcagcacattgggctgaggacagcttagcagctgttgagtctgttctcac

SEQ ID NO: 1343 - DNA, 76 bp, synthetic construct
  misc_feature 1..76: note = Description of Artificial Sequence: Synthetic oligonucleotide
  source 1..76: mol_type = other DNA
gacttgcacaacatgcagaatggcagcacattggttgggctgaggacagcttagcagctgttgagtctgttctcac

SEQ ID NO: 1344 - DNA, 79 bp, synthetic construct
  misc_feature 1..79: note = Description of Artificial Sequence: Synthetic oligonucleotide
  source 1..79: mol_type = other DNA
gacttgcacaacatgcagaatggcagcacattggtagttgggctgaggacagcttagcagctgttgagtctgttctcac

SEQ ID NO: 1345 - DNA, 53 bp, synthetic construct
  misc_feature 1..53: note = Description of Artificial Sequence: Synthetic oligonucleotide
  source 1..53: mol_type = other DNA
gacttgcacaacatgcagaatggcagcttagcagctgttgagtctgttctcac

SEQ ID NO: 1346 - DNA, 71 bp, synthetic construct
  misc_feature 1..71: note = Description of Artificial Sequence: Synthetic oligonucleotide
  source 1..71: mol_type = other DNA
gacttgcacaacatgcagaatggcagcacattggctgaggacagcttagcagctgttgagtctgttctcac

SEQ ID NO: 1347 - DNA, 79 bp, synthetic construct
  misc_feature 1..79: note = Description of Artificial Sequence: Synthetic oligonucleotide
  source 1..79: mol_type = other DNA
acaacatgcagaatggcagcacattggtaagttggctgaggacagcttagcagctgttgagtctgttctcacactgcta

SEQ ID NO: 1348 - DNA, 78 bp, synthetic construct
  misc_feature 1..78: note = Description of Artificial Sequence: Synthetic oligonucleotide
  source 1..78: mol_type = other DNA
acaacatgcagaatggcagcacattggtaagttggggaggacagcttagcagctgttgagtctgttctcacactgcta

SEQ ID NO: 1349 - DNA, 49 bp, synthetic construct
  misc_feature 1..49: note = Description of Artificial Sequence: Synthetic oligonucleotide
  source 1..49: mol_type = other DNA
acaacatgcagaatggcagcacattggtaagtctgttctcacactgcta

SEQ ID NO: 1350 - DNA, 74 bp, synthetic construct
  misc_feature 1..74: note = Description of Artificial Sequence: Synthetic oligonucleotide
  source 1..74: mol_type = other DNA
acaacatgcagaatggcagcacattggtaagttgggacagcttagcagctgttgagtctgttctcacactgcta

SEQ ID NO: 1351 - DNA, 65 bp, synthetic construct
  misc_feature 1..65: note = Description of Artificial Sequence: Synthetic oligonucleotide
  source 1..65: mol_type = other DNA
acaacatgcagaatggcagcacattggtaagcttagcagctgttgagtctgttctcacactgcta

SEQ ID NO: 1352 - DNA, 79 bp, synthetic construct
  misc_feature 1..79: note = Description of Artificial Sequence: Synthetic oligonucleotide
  source 1..79: mol_type = other DNA
ctgtgctcatgcccacagagacttgcacaacatgcaagaatggcagcacattggtaagttgggctgaggacagcttagc

SEQ ID NO: 1353 - DNA, 60 bp, synthetic construct
  misc_feature 1..60: note = Description of Artificial Sequence: Synthetic oligonucleotide
  source 1..60: mol_type = other DNA
ctgtgctcatgcccacagagacttgcacattggtaagttgggctgaggacagcttagcag

SEQ ID NO: 1354 - DNA, 73 bp, synthetic construct
  misc_feature 1..73: note = Description of Artificial Sequence: Synthetic oligonucleotide
  source 1..73: mol_type = other DNA
ctgtgctcatgcccacagagacttgcacaacatggcagcacattggtaagttgggctgaggacagcttagcag

SEQ ID NO: 1355 - DNA, 63 bp, synthetic construct
  misc_feature 1..63: note = Description of Artificial Sequence: Synthetic oligonucleotide
  source 1..63: mol_type = other DNA
ctgtgctcatgcccacagagacttgcagcacattggtaagttgggctgaggacagcttagcag

SEQ ID NO: 1356 - DNA, 78 bp, synthetic construct
  misc_feature 1..78: note = Description of Artificial Sequence: Synthetic oligonucleotide
  source 1..78: mol_type = other DNA
ctgtgctcatgcccacagagacttgcacaacatagaatggcagcacattggtaagttgggctgaggacagcttagcag

SEQ ID NO: 1357 - protein, 2002 aa, Homo sapiens
MEQDRTNHVEGNRLSPFLIPSPPICQTEPLATKLQNGSPLPERAHPEVNGDTKWHSFKSYYGIPCMKGSQNSRVSPDFTQESRGYSKCLQNGGIKRTVSEPSLSGLLQIKKLKQDQKANGERRNFGVSQERNPGESSQPNVSDLSDKKESVSSVAQENAVKDFTSFSTHNCSGPENPELQILNEQEGKSANYHDKNIVLLKNKAVLMPNGATVSASSVEHTHGELLEKTLSQYYPDCVSIAVQKTTSHINAINSQATNELSCEITHPSHTSGQINSAQTSNSELPPKPAAVVSEACDADDADNASKLAAMLNTCSFQKPEQLQQQKSVFEICPSPAENNIQGTTKLASGEEFCSGSSSNLQAPGGSSERYLKQNEMNGAYFKQSSVFTKDSFSATTTPPPPSQLLLSPPPPLPQVPQLPSEGKSTLNGGVLEEHHHYPNQSNTTLLREVKIEGKPEAPPSQSPNPSTHVCSPSPMLSERPQNNCVNRNDIQTAGTMTVPLCSEKTRPMSEHLKHNPPIFGSSGELQDNCQQLMRNKEQEILKGRDKEQTRDLVPPTQHYLKPGWIELKAPRFHQAESHLKRNEASLPSILQYQPNLSNQMTSKQYTGNSNMPGGLPRQAYTQKTTQLEHKSQMYQVEMNQGQSQGTVDQHLQFQKPSHQVHFSKTDHLPKAHVQSLCGTRFHFQQRADSQTEKLMSPVLKQHLNQQASETEPFSNSHLLQHKPHKQAAQTQPSQSSHLPQNQQQQQKLQIKNKEEILQTFPHPQSNNDQQREGSFFGQTKVEECFHGENQYSKSSEFETHNVQMGLEEVQNINRRNSPYSQTMKSSACKIQVSCSNNTHLVSENKEQTTHPELFAGNKTQNLHHMQYFPNNVIPKQDLLHRCFQEQEQKSQQASVLQGYKNRNQDMSGQQAAQLAQQRYLIHNHANVFPVPDQGGSHTQTPPQKDTQKHAALRWHLLQKQEQQQTQQPQTESCHSQMHRPIKVEPGCKPHACMHTAPPENKTWKKVTKQENPPASCDNVQQKSIIETMEQHLKQFHAKSLFDHKALTLKSQKQVKVEMSGPVTVLTRQTTAAELDSHTPALEQQTTSSEKTPTKRTAASVLNNFIESPSKLLDTPIKNLLDTPVKTQYDFPSCRCVEQIIEKDEGPFYTHLGAGPNVAAIREIMEERFGQKGKAIRIERVIYTGKEGKSSQGCPIAKWVVRRSSSEEKLLCLVRERAGHTCEAAVIVILILVWEGIPLSLADKLYSELTETLRKYGTLTNRRCALNEERTCACQGLDPETCGASFSFGCSWSMYYNGCKFARSKIPRKFKLLGDDPKEEEKLESHLQNLSTLMAPTYKKLAPDAYNNQIEYEHRAPECRLGLKEGRPFSGVTACLDFCAHAHRDLHNMQNGSTLVCTLTREDNREFGGKPEDEQLHVLPLYKVSDVDEFGSVEAQEEKKRSGAIQVLSSFRRKVRMLAEPVKTCRQRKLEAKKAAAEKLSSLENSSNKNEKEKSAPSRTKQTENASQAKQLAELLRLSGPVMQQSQQPQPLQKQPPQPQQQQRPQQQQPHHPQTESVNSYSASGSTNPYMRRPNPVSPYPNSSHTSDIYGSTSPMNFYSTSSQAAGSYLNSSNPMNPYPGLLNQNTQYPSYQCNGNLSVDNCSPYLGSYSPQSQPMDLYRYPSQDPLSKLSLPPIHTLYQPRFGNSQSFTSKYLGYGNQNMQGDGFSSCTIRPNVHHVGKLPPYPTHEMDGHFMGATSRLPPNLSNPNMDYKNGEHHSPSHIIHNYSAAPGMFNSSLHALHLQNKENDMLSHTANGLSKMLPALNHDRTACVQGGLHKLSDANGQEKQPLALVQGVASGAEDNDEVWSDSEQSFLDPDIGGVAVAPTHGSILIECAKRELHATTPLKNPNRNHPTRISLVFYQHKSMNEPKHGLALWEAKMAEKAREKEEECEKYGPDYVPQKSHGKKVKREPAEPHETSEPTYLRFIKSLAERTMSVTTDSTVTTSPYAFTRVTGPYNRYI

SEQ ID NO: 1358 - DNA, 9796 bp, Homo sapiens
  source 1..9796: mol_type = genomic DNA
ggcagtggcagcggcgagagcttgggcggccgccgccgcctcctcgcgagcgccgcgcgcccgggtcccgctcgcatgcaagtcacgtccgccccctcggcgcggccgccccgagacgccggccccgctgagtgatgagaacagacgtcaaactgccttatgaatattgatgcggaggctaggctgctttcgtagagaagcagaaggaagcaagatggctgccctttaggatttgttagaaaggagacccgactgcaactgctggattgctgcaaggctgagggacgagaacgaggctggcaaacattcagcagcacaccctctcaagattgtttacttgcctttgctcctgttgagttacaacgcttggaagcaggagatgggctcagcagcagccaataggacatgatccaggaagagcagtaagggactgagctgctgaattcaactagagggcagccttgtggatggccccgaagcaagcctgatggaacaggatagaaccaaccatgttgagggcaacagactaagtccattcctgataccatcacctcccatttgccagacagaacctctggctacaaagctccagaatggaagcccactgcctgagagagctcatccagaagtaaatggagacaccaagtggcactctttcaaaagttattatggaataccctgtatgaagggaagccagaatagtcgtgtgagtcctgactttacacaagaaagtagagggtattccaagtgtttgcaaaatggaggaataaaacgcacagttagtgaaccttctctctctgggctccttcagatcaagaaattgaaacaagaccaaaaggctaatggagaaagacgtaacttcggggtaagccaagaaagaaatccaggtgaaagcagtcaaccaaatgtctccgatttgagtgataagaaagaatctgtgagttctgtagcccaagaaaatgcagttaaagatttcaccagtttttcaacacataactgcagtgggcctgaaaatccagagcttcagattctgaatgagcaggaggggaaaagtgctaattaccatgacaagaacattgtattacttaaaaacaaggcagtgctaatgcctaatggtgctacagtttctgcctcttccgtggaacacacacatggtgaactcctggaaaaaacactgtctcaatattatccagattgtgtttccattgcggtgcagaaaaccacatctcacataaatgccattaacagtcaggctactaatgagttgtcctgtgagatcactcacccatcgcatacctcagggcagatcaattccgcacagacctctaactctgagctgcctccaaagccagctgcagtggtgagtgaggcctgtgatgctgatgatgctgataatgccagtaaactagctgcaatgctaaatacctgttcctttcagaaaccagaacaactacaacaacaaaaatcagtttttgagatatgcccatctcctgcagaaaataacatccagggaaccacaaagctagcgtctggtgaagaattctgttcaggttccagcagcaatttgcaagctcctggtggcagctctgaacggtatttaaaacaaaatgaaatgaatggtgcttacttcaagcaaagctcagtgttcactaaggattccttttctgccactaccacaccaccaccaccatcacaattgcttctttctccccctcctcctcttccacaggttcctcagcttccttcagaaggaaaaagcactctgaatggtggagttttagaagaacaccaccactaccccaaccaaagtaacacaacacttttaagggaagtgaaaatagagggtaaacctgaggcaccaccttcccagagtcctaatccatctacacatgtatgcagcccttctccgatgctttctgaaaggcctcagaataattgtgtgaacaggaatgacatacagactgcagggacaatgactgttccattgtgttctgagaaaacaagaccaatgtcagaacacctcaagcataacccaccaatttttggtagcagtggagagctacaggacaactgccagcagttgatgagaaacaaagagcaagagattctgaagggtcgagacaaggagcaaacacgagatcttgtgcccccaacacagcactatctgaaaccaggatggattgaattgaaggcccctcgttttcaccaagcggaatcccatctaaaacgtaatgaggcatcactgccatcaattcttcagtatcaacccaatctctccaatcaaatgacctccaaacaatacactggaaattccaacatgcctggggggctcccaaggcaagcttacacccagaaaacaacacagctggagcacaagtcacaaatgtaccaagttgaaatgaatcaagggcagtcccaaggtacagtggaccaacatctccagttccaaaaaccctcacaccaggtgcacttctccaaaacagaccatttaccaaaagctcatgtgcagtcactgtgtggcactagatttcattttcaacaaagagcagattcccaaactgaaaaacttatgtccccagtgttgaaacagcacttgaatcaacaggcttcagagactgagccattttcaaactcacaccttttgcaacataagcctcataaacaggcagcacaaacacaaccatcccagagttcacatctccctcaaaaccagcaacagcagcaaaaattacaaataaagaataaagaggaaatactccagacttttcctcacccccaaagcaacaatgatcagcaaagagaaggatcattctttggccagactaaagtggaagaatgttttcatggtgaaaatcagtattcaaaatcaagcgagttcgagactcataatgtccaaatgggactggaggaagtacagaatataaatcgtagaaattccccttatagtcagaccatgaaatcaagtgcatgcaaaatacaggtttcttgttcaaacaatacacacctagtttcagagaataaagaacagactacacatcctgaactttttgcaggaaacaagacccaaaacttgcatcacatgcaatattttccaaataatgtgatcccaaagcaagatcttcttcacaggtgctttcaagaacaggagcagaagtcacaacaagcttcagttctacagggatataaaaatagaaaccaagatatgtctggtcaacaagctgcgcaacttgctcagcaaaggtacttgatacataaccatgcaaatgtttttcctgtgcctgaccagggaggaagtcacactcagacccctccccagaaggacactcaaaagcatgctgctctaaggtggcatctcttacagaagcaagaacagcagcaaacacagcaaccccaaactgagtcttgccatagtcagatgcacaggccaattaaggtggaacctggatgcaagccacatgcctgtatgcacacagcaccaccagaaaacaaaacatggaaaaaggtaactaagcaagagaatccacctgcaagctgtgataatgtgcagcaaaagagcatcattgagaccatggagcagcatctgaagcagtttcacgccaagtcgttatttgaccataaggctcttactctcaaatcacagaagcaagtaaaagttgaaatgtcagggccagtcacagttttgactagacaaaccactgctgcagaacttgatagccacaccccagctttagagcagcaaacaacttcttcagaaaagacaccaaccaaaagaacagctgcttctgttctcaataattttatagagtcaccttccaaattactagatactcctataaaaaatttattggatacacctgtcaagactcaatatgatttcccatcttgcagatgtgtagagcaaattattgaaaaagatgaaggtcctttttatacccatctaggagcaggtcctaatgtggcagctattagagaaatcatggaagaaaggtttggacagaagggtaaagctattaggattgaaagagtcatctatactggtaaagaaggcaaaagttctcagggatgtcctattgctaagtgggtggttcgcagaagcagcagtgaagagaagctactgtgtttggtgcgggagcgagctggccacacctgtgaggctgcagtgattgtgattctcatcctggtgtgggaaggaatcccgctgtctctggctgacaaactctactcggagcttaccgagacgctgaggaaatacggcacgctcaccaatcgccggtgtgccttgaatgaagagagaacttgcgcctgtcaggggctggatccagaaacctgtggtgcctccttctcttttggttgttcatggagcatgtactacaatggatgtaagtttgccagaagcaagatcccaaggaagtttaagctgcttggggatgacccaaaagaggaagagaaactggagtctcatttgcaaaacctgtccactcttatggcaccaacatataagaaacttgcacctgatgcatataataatcagattgaatatgaacacagagcaccagagtgccgtctgggtctgaaggaaggccgtccattctcaggggtcactgcatgtttggacttctgtgctcatgcccacagagacttgcacaacatgcagaatggcagcacattggtatgcactctcactagagaagacaatcgagaatttggaggaaaacctgaggatgagcagcttcacgttctgcctttatacaaagtctctgacgtggatgagtttgggagtgtggaagctcaggaggagaaaaaacggagtggtgccattcaggtactgagttcttttcggcgaaaagtcaggatgttagcagagccagtcaagacttgccgacaaaggaaactagaagccaagaaagctgcagctgaaaagctttcctccctggagaacagctcaaataaaaatgaaaaggaaaagtcagccccatcacgtacaaaacaaactgaaaacgcaagccaggctaaacagttggcagaacttttgcgactttcaggaccagtcatgcagcagtcccagcagccccagcctctacagaagcagccaccacagccccagcagcagcagagaccccagcagcagcagccacatcaccctcagacagagtctgtcaactcttattctgcttctggatccaccaatccatacatgagacggcccaatccagttagtccttatccaaactcttcacacacttcagatatctatggaagcaccagccctatgaacttctattccacctcatctcaagctgcaggttcatatttgaattcttctaatcccatgaacccttaccctgggcttttgaatcagaatacccaatatccatcatatcaatgcaatggaaacctatcagtggacaactgctccccatatctgggttcctattctccccagtctcagccgatggatctgtataggtatccaagccaagaccctctgtctaagctcagtctaccacccatccatacactttaccagccaaggtttggaaatagccagagttttacatctaaatacttaggttatggaaaccaaaatatgcagggagatggtttcagcagttgtaccattagaccaaatgtacatcatgtagggaaattgcctccttatcccactcatgagatggatggccacttcatgggagccacctctagattaccacccaatctgagcaatccaaacatggactataaaaatggtgaacatcattcaccttctcacataatccataactacagtgcagctccgggcatgttcaacagctctcttcatgccctgcatctccaaaacaaggagaatgacatgctttcccacacagctaatgggttatcaaagatgcttccagctcttaaccatgatagaactgcttgtgtccaaggaggcttacacaaattaagtgatgctaatggtcaggaaaagcagccattggcactagtccagggtgtggcttctggtgcagaggacaacgatgaggtctggtcagacagcgagcagagctttctggatcctgacattgggggagtggccgtggctccaactcatgggtcaattctcattgagtgtgcaaagcgtgagctgcatgccacaacccctttaaagaatcccaataggaatcaccccaccaggatctccctcgtcttttaccagcataagagcatgaatgagccaaaacatggcttggctctttgggaagccaaaatggctgaaaaagcccgtgagaaagaggaagagtgtgaaaagtatggcccagactatgtgcctcagaaatcccatggcaaaaaagtgaaacgggagcctgctgagccacatgaaacttcagagcccacttacctgcgtttcatcaagtctcttgccgaaaggaccatgtccgtgaccacagactccacagtaactacatctccatatgccttcactcgggtcacagggccttacaacagatatatatgatatcacccccttttgttggttacctcacttgaaaagaccacaaccaacctgtcagtagtatagttctcatgacgtgggcagtggggaaaggtcacagtattcatgacaaatgtggtgggaaaaacctcagctcaccagcaacaaaagaggttatcttaccatagcacttaattttcactggctcccaagtggtcacagatggcatctaggaaaagaccaaagcattctatgcaaaaagaaggtggggaagaaagtgttccgcaatttacatttttaaacactggttctattattggacgagatgatatgtaaatgtgatcccccccccccgcttacaactctacacatctgtgaccacttttaataatatcaagtttgcatagtcatggaacacaaatcaaacaagtactgtagtattacagtgacaggaatcttaaaataccatctggtgctgaatatatgatgtactgaaatactggaattatggctttttgaaatgcagtttttactgtaatcttaacttttatttatcaaaatagctacaggaaacatgaatagcaggaaaacactgaatttgtttggatgttctaagaaatggtgctaagaaaatggtgtctttaatagctaaaaatttaatgcctttatatcatcaagatgctatcagtgtactccagtgcccttgaataataggggtaccttttcattcaagtttttatcataattacctattcttacacaagcttagtttttaaaatgtggacattttaaaggcctctggattttgctcatccagtgaagtccttgtaggacaataaacgtatatatgtacatatatacacaaacatgtatatgtgcacacacatgtatatgtataaatattttaaatggtgttttagaagcactttgtctacctaagctttgacaacttgaacaatgctaaggtactgagatgtttaaaaaacaagtttactttcattttagaatgcaaagttgatttttttaaggaaacaaagaaagcttttaaaatatttttgcttttagccatgcatctgctgatgagcaattgtgtccatttttaacacagccagttaaatccaccatggggcttactggattcaagggaatacgttagtccacaaaacatgttttctggtgctcatctcacatgctatactgtaaaacagttttatacaaaattgtatgacaagttcattgctcaaaaatgtacagttttaagaattttctattaactgcaggtaataattagctgcatgctgcagactcaacaaagctagttcactgaagcctatgctattttatggatcataggctcttcagagaactgaatggcagtctgcctttgtgttgataattatgtacattgtgacgttgtcatttcttagcttaagtgtcctctttaacaagaggattgagcagactgatgcctgcataagatgaataaacagggttagttccatgtgaatctgtcagttaaaaagaaacaaaaacaggcagctggtttgctgtggtggttttaaatcattaatttgtataaagaagtgaaagagttgtatagtaaattaaattgtaaacaaaacttttttaatgcaatgctttagtattttagtactgtaaaaaaattaaatatatacatatatatatatatatatatatatatatatatgagtttgaagcagaattcacatcatgatggtgctactcagcctgctacaaatatatcataatgtgagctaagaattcattaaatgtttgagtgatgttcctacttgtcatatacctcaacactagtttggcaataggatattgaactgagagtgaaagcattgtgtaccatcatttttttccaagtccttttttttattgttaaaaaaaaaagcataccttttttcaatacttgatttcttagcaagtataacttgaacttcaacctttttgttctaaaaattcagggatatttcagctcatgctctccctatgccaacatgtcacctgtgtttatgtaaaattgttgtaggttaataaatatattctttgtcagggatttaacccttttattttgaatcccttctattttacttgtacatgtgctgatgtaactaaaactaattttgtaaatctgttggctctttttattgtaaagaaaagcattttaaaagtttgaggaatcttttgactgtttcaagcaggaaaaaaaaattacatgaaaatagaatgcactgagttgataaagggaaaaattgtaaggcaggagtttggcaagtggctgttggccagagacttacttgtaactctctaaatgaagtttttttgatcctgtaatcactgaaggtacatactccatgtggacttcccttaaacaggcaaacacctacaggtatggtgtgcaacagattgtacaattacattttggcctaaatacatttttgcttactagtatttaaaataaattcttaatcagaggaggcctttgggttttattggtcaaatctttgtaagctggcttttgtctttttaaaaaatttcttgaatttgtggttgtgtccaatttgcaaacatttccaaaaatgtttgctttgcttacaaaccacatgattttaatgttttttgtataccataatatctagccccaaacatttgattactacatgtgcattggtgattttgatcatccattcttaatatttgatttctgtgtcacctactgtcatttgttaaactgctggccaacaagaacaggaagtatagtttggggggttggggagagtttacataaggaagagaagaaattgagtggcatattgtaaatatcagatctataattgtaaatataaaacctgcctcagttagaatgaatggaaagcagatctacaatttgctaatataggaatatcaggttgactatatagccatacttgaaaatgcttctgagtggtgtcaactttacttgaatgaatttttcatcttgattgacgcacagtgatgtacagttcacttctgaagctagtggttaacttgtgtaggaaacttttgcagtttgacactaagataacttctgtgtgcatttttctatgcttttttaaaaactagtttcatttcattttcatgagatgtttggtttataagatctgaggatggttataaatactgtaagtattgtaatgttatgaatgcaggttatttgaaagctgtttattattatatcattcctgataatgctatgtgagtgtttttaataaaatttatatttatttaatgcactctaaaaaaaaaaaaaaaaaa

SEQ ID NO: 1359 - DNA, 9437 bp, Homo sapiens
  source 1..9437: mol_type = genomic DNA
aagcagaaggaagcaagatggctgccctttaggatttgttagaaaggagacccgactgcaactgctggattgctgcaaggctgagggacgagaacgagaattcaactagagggcagccttgtggatggccccgaagcaagcctgatggaacaggatagaaccaaccatgttgagggcaacagactaagtccattcctgataccatcacctcccatttgccagacagaacctctggctacaaagctccagaatggaagcccactgcctgagagagctcatccagaagtaaatggagacaccaagtggcactctttcaaaagttattatggaataccctgtatgaagggaagccagaatagtcgtgtgagtcctgactttacacaagaaagtagagggtattccaagtgtttgcaaaatggaggaataaaacgcacagttagtgaaccttctctctctgggctccttcagatcaagaaattgaaacaagaccaaaaggctaatggagaaagacgtaacttcggggtaagccaagaaagaaatccaggtgaaagcagtcaaccaaatgtctccgatttgagtgataagaaagaatctgtgagttctgtagcccaagaaaatgcagttaaagatttcaccagtttttcaacacataactgcagtgggcctgaaaatccagagcttcagattctgaatgagcaggaggggaaaagtgctaattaccatgacaagaacattgtattacttaaaaacaaggcagtgctaatgcctaatggtgctacagtttctgcctcttccgtggaacacacacatggtgaactcctggaaaaaacactgtctcaatattatccagattgtgtttccattgcggtgcagaaaaccacatctcacataaatgccattaacagtcaggctactaatgagttgtcctgtgagatcactcacccatcgcatacctcagggcagatcaattccgcacagacctctaactctgagctgcctccaaagccagctgcagtggtgagtgaggcctgtgatgctgatgatgctgataatgccagtaaactagctgcaatgctaaatacctgttcctttcagaaaccagaacaactacaacaacaaaaatcagtttttgagatatgcccatctcctgcagaaaataacatccagggaaccacaaagctagcgtctggtgaagaattctgttcaggttccagcagcaatttgcaagctcctggtggcagctctgaacggtatttaaaacaaaatgaaatgaatggtgcttacttcaagcaaagctcagtgttcactaaggattccttttctgccactaccacaccaccaccaccatcacaattgcttctttctccccctcctcctcttccacaggttcctcagcttccttcagaaggaaaaagcactctgaatggtggagttttagaagaacaccaccactaccccaaccaaagtaacacaacacttttaagggaagtgaaaatagagggtaaacctgaggcaccaccttcccagagtcctaatccatctacacatgtatgcagcccttctccgatgctttctgaaaggcctcagaataattgtgtgaacaggaatgacatacagactgcagggacaatgactgttccattgtgttctgagaaaacaagaccaatgtcagaacacctcaagcataacccaccaatttttggtagcagtggagagctacaggacaactgccagcagttgatgagaaacaaagagcaagagattctgaagggtcgagacaaggagcaaacacgagatcttgtgcccccaacacagcactatctgaaaccaggatggattgaattgaaggcccctcgttttcaccaagcggaatcccatctaaaacgtaatgaggcatcactgccatcaattcttcagtatcaacccaatctctccaatcaaatgacctccaaacaatacactggaaattccaacatgcctggggggctcccaaggcaagcttacacccagaaaacaacacagctggagcacaagtcacaaatgtaccaagttgaaatgaatcaagggcagtcccaaggtacagtggaccaacatctccagttccaaaaaccctcacaccaggtgcacttctccaaaacagaccatttaccaaaagctcatgtgcagtcactgtgtggcactagatttcattttcaacaaagagcagattcccaaactgaaaaacttatgtccccagtgttgaaacagcacttgaatcaacaggcttcagagactgagccattttcaaactcacaccttttgcaacataagcctcataaacaggcagcacaaacacaaccatcccagagttcacatctccctcaaaaccagcaacagcagcaaaaattacaaataaagaataaagaggaaatactccagacttttcctcacccccaaagcaacaatgatcagcaaagagaaggatcattctttggccagactaaagtggaagaatgttttcatggtgaaaatcagtattcaaaatcaagcgagttcgagactcataatgtccaaatgggactggaggaagtacagaatataaatcgtagaaattccccttatagtcagaccatgaaatcaagtgcatgcaaaatacaggtttcttgttcaaacaatacacacctagtttcagagaataaagaacagactacacatcctgaactttttgcaggaaacaagacccaaaacttgcatcacatgcaatattttccaaataatgtgatcccaaagcaagatcttcttcacaggtgctttcaagaacaggagcagaagtcacaacaagcttcagttctacagggatataaaaatagaaaccaagatatgtctggtcaacaagctgcgcaacttgctcagcaaaggtacttgatacataaccatgcaaatgtttttcctgtgcctgaccagggaggaagtcacactcagacccctccccagaaggacactcaaaagcatgctgctctaaggtggcatctcttacagaagcaagaacagcagcaaacacagcaaccccaaactgagtcttgccatagtcagatgcacaggccaattaaggtggaacctggatgcaagccacatgcctgtatgcacacagcaccaccagaaaacaaaacatggaaaaaggtaactaagcaagagaatccacctgcaagctgtgataatgtgcagcaaaagagcatcattgagaccatggagcagcatctgaagcagtttcacgccaagtcgttatttgaccataaggctcttactctcaaatcacagaagcaagtaaaagttgaaatgtcagggccagtcacagttttgactagacaaaccactgctgcagaacttgatagccacaccccagctttagagcagcaaacaacttcttcagaaaagacaccaaccaaaagaacagctgcttctgttctcaataattttatagagtcaccttccaaattactagatactcctataaaaaatttattggatacacctgtcaagactcaatatgatttcccatcttgcagatgtgtagagcaaattattgaaaaagatgaaggtcctttttatacccatctaggagcaggtcctaatgtggcagctattagagaaatcatggaagaaaggtttggacagaagggtaaagctattaggattgaaagagtcatctatactggtaaagaaggcaaaagttctcagggatgtcctattgctaagtgggtggttcgcagaagcagcagtgaagagaagctactgtgtttggtgcgggagcgagctggccacacctgtgaggctgcagtgattgtgattctcatcctggtgtgggaaggaatcccgctgtctctggctgacaaactctactcggagcttaccgagacgctgaggaaatacggcacgctcaccaatcgccggtgtgccttgaatgaagagagaacttgcgcctgtcaggggctggatccagaaacctgtggtgcctccttctcttttggttgttcatggagcatgtactacaatggatgtaagtttgccagaagcaagatcccaaggaagtttaagctgcttggggatgacccaaaagaggaagagaaactggagtctcatttgcaaaacctgtccactcttatggcaccaacatataagaaacttgcacctgatgcatataataatcagattgaatatgaacacagagcaccagagtgccgtctgggtctgaaggaaggccgtccattctcaggggtcactgcatgtttggacttctgtgctcatgcccacagagacttgcacaacatgcagaatggcagcacattggtatgcactctcactagagaagacaatcgagaatttggaggaaaacctgaggatgagcagcttcacgttctgcctttatacaaagtctctgacgtggatgagtttgggagtgtggaagctcaggaggagaaaaaacggagtggtgccattcaggtactgagttcttttcggcgaaaagtcaggatgttagcagagccagtcaagacttgccgacaaaggaaactagaagccaagaaagctgcagctgaaaagctttcctccctggagaacagctcaaataaaaatgaaaaggaaaagtcagccccatcacgtacaaaacaaactgaaaacgcaagccaggctaaacagttggcagaacttttgcgactttcaggaccagtcatgcagcagtcccagcagccccagcctctacagaagcagccaccacagccccagcagcagcagagaccccagcagcagcagccacatcaccctcagacagagtctgtcaactcttattctgcttctggatccaccaatccatacatgagacggcccaatccagttagtccttatccaaactcttcacacacttcagatatctatggaagcaccagccctatgaacttctattccacctcatctcaagctgcaggttcatatttgaattcttctaatcccatgaacccttaccctgggcttttgaatcagaatacccaatatccatcatatcaatgcaatggaaacctatcagtggacaactgctccccatatctgggttcctattctccccagtctcagccgatggatctgtataggtatccaagccaagaccctctgtctaagctcagtctaccacccatccatacactttaccagccaaggtttggaaatagccagagttttacatctaaatacttaggttatggaaaccaaaatatgcagggagatggtttcagcagttgtaccattagaccaaatgtacatcatgtagggaaattgcctccttatcccactcatgagatggatggccacttcatgggagccacctctagattaccacccaatctgagcaatccaaacatggactataaaaatggtgaacatcattcaccttctcacataatccataactacagtgcagctccgggcatgttcaacagctctcttcatgccctgcatctccaaaacaaggagaatgacatgctttcccacacagctaatgggttatcaaagatgcttccagctcttaaccatgatagaactgcttgtgtccaaggaggcttacacaaattaagtgatgctaatggtcaggaaaagcagccattggcactagtccagggtgtggcttctggtgcagaggacaacgatgaggtctggtcagacagcgagcagagctttctggatcctgacattgggggagtggccgtggctccaactcatgggtcaattctcattgagtgtgcaaagcgtgagctgcatgccacaacccctttaaagaatcccaataggaatcaccccaccaggatctccctcgtcttttaccagcataagagcatgaatgagccaaaacatggcttggctctttgggaagccaaaatggctgaaaaagcccgtgagaaagaggaagagtgtgaaaagtatggcccagactatgtgcctcagaaatcccatggcaaaaaagtgaaacgggagcctgctgagccacatgaaacttcagagcccacttacctgcgtttcatcaagtctcttgccgaaaggaccatgtccgtgaccacagactccacagtaactacatctccatatgccttcactcgggtcacagggccttacaacagatatatatgatatcacccccttttgttggttacctcacttgaaaagaccacaaccaacctgtcagtagtatagttctcatgacgtgggcagtggggaaaggtcacagtattcatgacaaatgtggtgggaaaaacctcagctcaccagcaacaaaagaggttatcttaccatagcacttaattttcactggctcccaagtggtcacagatggcatctaggaaaagaccaaagcattctatgcaaaaagaaggtggggaagaaagtgttccgcaatttacatttttaaacactggttctattattggacgagatgatatgtaaatgtgatcccccccccccgcttacaactctacacatctgtgaccacttttaataatatcaagtttgcatagtcatggaacacaaatcaaacaagtactgtagtattacagtgacaggaatcttaaaataccatctggtgctgaatatatgatgtactgaaatactggaattatggctttttgaaatgcagtttttactgtaatcttaacttttatttatcaaaatagctacaggaaacatgaatagcaggaaaacactgaatttgtttggatgttctaagaaatggtgctaagaaaatggtgtctttaatagctaaaaatttaatgcctttatatcatcaagatgctatcagtgtactccagtgcccttgaataataggggtaccttttcattcaagtttttatcataattacctattcttacacaagcttagtttttaaaatgtggacattttaaaggcctctggattttgctcatccagtgaagtccttgtaggacaataaacgtatatatgtacatatatacacaaacatgtatatgtgcacacacatgtatatgtataaatattttaaatggtgttttagaagcactttgtctacctaagctttgacaacttgaacaatgctaaggtactgagatgtttaaaaaacaagtttactttcattttagaatgcaaagttgatttttttaaggaaacaaagaaagcttttaaaatatttttgcttttagccatgcatctgctgatgagcaattgtgtccatttttaacacagccagttaaatccaccatggggcttactggattcaagggaatacgttagtccacaaaacatgttttctggtgctcatctcacatgctatactgtaaaacagttttatacaaaattgtatgacaagttcattgctcaaaaatgtacagttttaagaattttctattaactgcaggtaataattagctgcatgctgcagactcaacaaagctagttcactgaagcctatgctattttatggatcataggctcttcagagaactgaatggcagtctgcctttgtgttgataattatgtacattgtgacgttgtcatttcttagcttaagtgtcctctttaacaagaggattgagcagactgatgcctgcataagatgaataaacagggttagttccatgtgaatctgtcagttaaaaagaaacaaaaacaggcagctggtttgctgtggtggttttaaatcattaatttgtataaagaagtgaaagagttgtatagtaaattaaattgtaaacaaaacttttttaatgcaatgctttagtattttagtactgtaaaaaaattaaatatatacatatatatatatatatatatatatatatatatgagtttgaagcagaattcacatcatgatggtgctactcagcctgctacaaatatatcataatgtgagctaagaattcattaaatgtttgagtgatgttcctacttgtcatatacctcaacactagtttggcaataggatattgaactgagagtgaaagcattgtgtaccatcatttttttccaagtccttttttttattgttaaaaaaaaaagcataccttttttcaatacttgatttcttagcaagtataacttgaacttcaacctttttgttctaaaaattcagggatatttcagctcatgctctccctatgccaacatgtcacctgtgtttatgtaaaattgttgtaggttaataaatatattctttgtcagggatttaacccttttattttgaatcccttctattttacttgtacatgtgctgatgtaactaaaactaattttgtaaatctgttggctctttttattgtaaagaaaagcattttaaaagtttgaggaatcttttgactgtttcaagcaggaaaaaaaaattacatgaaaatagaatgcactgagttgataaagggaaaaattgtaaggcaggagtttggcaagtggctgttggccagagacttacttgtaactctctaaatgaagtttttttgatcctgtaatcactgaaggtacatactccatgtggacttcccttaaacaggcaaacacctacaggtatggtgtgcaacagattgtacaattacattttggcctaaatacatttttgcttactagtatttaaaataaattcttaatcagaggaggcctttgggttttattggtcaaatctttgtaagctggcttttgtctttttaaaaaatttcttgaatttgtggttgtgtccaatttgcaaacatttccaaaaatgtttgctttgcttacaaaccacatgattttaatgttttttgtataccataatatctagccccaaacatttgattactacatgtgcattggtgattttgatcatccattcttaatatttgatttctgtgtcacctactgtcatttgttaaactgctggccaacaagaacaggaagtatagtttggggggttggggagagtttacataaggaagagaagaaattgagtggcatattgtaaatatcagatctataattgtaaatataaaacctgcctcagttagaatgaatggaaagcagatctacaatttgctaatataggaatatcaggttgactatatagccatacttgaaaatgcttctgagtggtgtcaactttacttgaatgaatttttcatcttgattgacgcacagtgatgtacagttcacttctgaagctagtggttaacttgtgtaggaaacttttgcagtttgacactaagataacttctgtgtgcatttttctatgcttttttaaaaactagtttcatttcattttcatgagatgtttggtttataagatctgaggatggttataaatactgtaagtattgtaatgttatgaatgcaggttatttgaaagctgtttattattatatcattcctgataatgctatgtgagtgtttttaataaaatttatatttatttaatgcactctaa

SEQ ID NO: 1360 - DNA, 9289 bp, Homo sapiens
  source 1..9289: mol_type = genomic DNA
gtagagaagcagaaggaagcaagatggctgccctttaggatttgttagaaaggagacccgactgcaactgctggattgctgcaaggctgagggacgagaacgaggctggcaaacattcagcagcacaccctctcaagattgtttacttgcctttgctcctgttgagttacaacgcttggaagcaggagatgggctcagcagcagccaataggacatgatccaggaagagcagtaagggactgagctgctgaattcaactagagggcagccttgtggatggccccgaagcaagcctgatggaacaggatagaaccaaccatgttgagggcaacagactaagtccattcctgataccatcacctcccatttgccagacagaacctctggctacaaagctccagaatggaagcccactgcctgagagagctcatccagaagtaaatggagacaccaagtggcactctttcaaaagttattatggaataccctgtatgaagggaagccagaatagtcgtgtgagtcctgactttacacaagaaagtagagggtattccaagtgtttgcaaaatggaggaataaaacgcacagttagtgaaccttctctctctgggctccttcagatcaagaaattgaaacaagaccaaaaggctaatggagaaagacgtaacttcggggtaagccaagaaagaaatccaggtgaaagcagtcaaccaaatgtctccgatttgagtgataagaaagaatctgtgagttctgtagcccaagaaaatgcagttaaagatttcaccagtttttcaacacataactgcagtgggcctgaaaatccagagcttcagattctgaatgagcaggaggggaaaagtgctaattaccatgacaagaacattgtattacttaaaaacaaggcagtgctaatgcctaatggtgctacagtttctgcctcttccgtggaacacacacatggtgaactcctggaaaaaacactgtctcaatattatccagattgtgtttccattgcggtgcagaaaaccacatctcacataaatgccattaacagtcaggctactaatgagttgtcctgtgagatcactcacccatcgcatacctcagggcagatcaattccgcacagacctctaactctgagctgcctccaaagccagctgcagtggtgagtgaggcctgtgatgctgatgatgctgataatgccagtaaactagctgcaatgctaaatacctgttcctttcagaaaccagaacaactacaacaacaaaaatcagtttttgagatatgcccatctcctgcagaaaataacatccagggaaccacaaagctagcgtctggtgaagaattctgttcaggttccagcagcaatttgcaagctcctggtggcagctctgaacggtatttaaaacaaaatgaaatgaatggtgcttacttcaagcaaagctcagtgttcactaaggattccttttctgccactaccacaccaccaccaccatcacaattgcttctttctccccctcctcctcttccacaggttcctcagcttccttcagaaggaaaaagcactctgaatggtggagttttagaagaacaccaccactaccccaaccaaagtaacacaacacttttaagggaagtgaaaatagagggtaaacctgaggcaccaccttcccagagtcctaatccatctacacatgtatgcagcccttctccgatgctttctgaaaggcctcagaataattgtgtgaacaggaatgacatacagactgcagggacaatgactgttccattgtgttctgagaaaacaagaccaatgtcagaacacctcaagcataacccaccaatttttggtagcagtggagagctacaggacaactgccagcagttgatgagaaacaaagagcaagagattctgaagggtcgagacaaggagcaaacacgagatcttgtgcccccaacacagcactatctgaaaccaggatggattgaattgaaggcccctcgttttcaccaagcggaatcccatctaaaacgtaatgaggcatcactgccatcaattcttcagtatcaacccaatctctccaatcaaatgacctccaaacaatacactggaaattccaacatgcctggggggctcccaaggcaagcttacacccagaaaacaacacagctggagcacaagtcacaaatgtaccaagttgaaatgaatcaagggcagtcccaaggtacagtggaccaacatctccagttccaaaaaccctcacaccaggtgcacttctccaaaacagaccatttaccaaaagctcatgtgcagtcactgtgtggcactagatttcattttcaacaaagagcagattcccaaactgaaaaacttatgtccccagtgttgaaacagcacttgaatcaacaggcttcagagactgagccattttcaaactcacaccttttgcaacataagcctcataaacaggcagcacaaacacaaccatcccagagttcacatctccctcaaaaccagcaacagcagcaaaaattacaaataaagaataaagaggaaatactccagacttttcctcacccccaaagcaacaatgatcagcaaagagaaggatcattctttggccagactaaagtggaagaatgttttcatggtgaaaatcagtattcaaaatcaagcgagttcgagactcataatgtccaaatgggactggaggaagtacagaatataaatcgtagaaattccccttatagtcagaccatgaaatcaagtgcatgcaaaatacaggtttcttgttcaaacaatacacacctagtttcagagaataaagaacagactacacatcctgaactttttgcaggaaacaagacccaaaacttgcatcacatgcaatattttccaaataatgtgatcccaaagcaagatcttcttcacaggtgctttcaagaacaggagcagaagtcacaacaagcttcagttctacagggatataaaaatagaaaccaagatatgtctggtcaacaagctgcgcaacttgctcagcaaaggtacttgatacataaccatgcaaatgtttttcctgtgcctgaccagggaggaagtcacactcagacccctccccagaaggacactcaaaagcatgctgctctaaggtggcatctcttacagaagcaagaacagcagcaaacacagcaaccccaaactgagtcttgccatagtcagatgcacaggccaattaaggtggaacctggatgcaagccacatgcctgtatgcacacagcaccaccagaaaacaaaacatggaaaaaggtaactaagcaagagaatccacctgcaagctgtgataatgtgcagcaaaagagcatcattgagaccatggagcagcatctgaagcagtttcacgccaagtcgttatttgaccataaggctcttactctcaaatcacagaagcaagtaaaagttgaaatgtcagggccagtcacagttttgactagacaaaccactgctgcagaacttgatagccacaccccagctttagagcagcaaacaacttcttcagaaaagacaccaaccaaaagaacagctgcttctgttctcaataattttatagagtcaccttccaaattactagatactcctataaaaaatttattggatacacctgtcaagactcaatatgatttcccatcttgcagatgtgtaggtttggacagaagggtaaagctattaggattgaaagagtcatctatactggtaaagaaggcaaaagttctcagggatgtcctattgctaagtgggagaacttgcgcctgtcaggggctggatccagaaacctgtggtgcctccttctcttttggttgttcatggagcatgtactacaatggatgtaagtttgccagaagcaagatcccaaggaagtttaagctgcttggggatgacccaaaagaggaagagaaactggagtctcatttgcaaaacctgtccactcttatggcaccaacatataagaaacttgcacctgatgcatataataatcagattgaatatgaacacagagcaccagagtgccgtctgggtctgaaggaaggccgtccattctcaggggtcactgcatgtttggacttctgtgctcatgcccacagagacttgcacaacatgcagaatggcagcacattggtatgcactctcactagagaagacaatcgagaatttggaggaaaacctgaggatgagcagcttcacgttctgcctttatacaaagtctctgacgtggatgagtttgggagtgtggaagctcaggaggagaaaaaacggagtggtgccattcaggtactgagttcttttcggcgaaaagtcaggatgttagcagagccagtcaagacttgccgacaaaggaaactagaagccaagaaagctgcagctgaaaagctttcctccctggagaacagctcaaataaaaatgaaaaggaaaagtcagccccatcacgtacaaaacaaactgaaaacgcaagccaggctaaacagttggcagaacttttgcgactttcaggaccagtcatgcagcagtcccagcagccccagcctctacagaagcagccaccacagccccagcagcagcagagaccccagcagcagcagccacatcaccctcagacagagtctgtcaactcttattctgcttctggatccaccaatccatacatgagacggcccaatccagttagtccttatccaaactcttcacacacttcagatatctatggaagcaccagccctatgaacttctattccacctcatctcaagctgcaggttcatatttgaattcttctaatcccatgaacccttaccctgggcttttgaatcagaatacccaatatccatcatatcaatgcaatggaaacctatcagtggacaactgctccccatatctgggttcctattctccccagtctcagccgatggatctgtataggtatccaagccaagaccctctgtctaagctcagtctaccacccatccatacactttaccagccaaggtttggaaatagccagagttttacatctaaatacttaggttatggaaaccaaaatatgcagggagatggtttcagcagttgtaccattagaccaaatgtacatcatgtagggaaattgcctccttatcccactcatgagatggatggccacttcatgggagccacctctagattaccacccaatctgagcaatccaaacatggactataaaaatggtgaacatcattcaccttctcacataatccataactacagtgcagctccgggcatgttcaacagctctcttcatgccctgcatctccaaaacaaggagaatgacatgctttcccacacagctaatgggttatcaaagatgcttccagctcttaaccatgatagaactgcttgtgtccaaggaggcttacacaaattaagtgatgctaatggtcaggaaaagcagccattggcactagtccagggtgtggcttctggtgcagaggacaacgatgaggtctggtcagacagcgagcagagctttctggatcctgacattgggggagtggccgtggctccaactcatgggtcaattctcattgagtgtgcaaagcgtgagctgcatgccacaacccctttaaagaatcccaataggaatcaccccaccaggatctccctcgtcttttaccagcataagagcatgaatgagccaaaacatggcttggctctttgggaagccaaaatggctgaaaaagcccgtgagaaagaggaagagtgtgaaaagtatggcccagactatgtgcctcagaaatcccatggcaaaaaagtgaaacgggagcctgctgagccacatgaaacttcagagcccacttacctgcgtttcatcaagtctcttgccgaaaggaccatgtccgtgaccacagactccacagtaactacatctccatatgccttcactcgggtcacagggccttacaacagatatatatgatatcacccccttttgttggttacctcacttgaaaagaccacaaccaacctgtcagtagtatagttctcatgacgtgggcagtggggaaaggtcacagtattcatgacaaatgtggtgggaaaaacctcagctcaccagcaacaaaagaggttatcttaccatagcacttaattttcactggctcccaagtggtcacagatggcatctaggaaaagaccaaagcattctatgcaaaaagaaggtggggaagaaagtgttccgcaatttacatttttaaacactggttctattattggacgagatgatatgtaaatgtgatcccccccccccgcttacaactctacacatctgtgaccacttttaataatatcaagtttgcatagtcatggaacacaaatcaaacaagtactgtagtattacagtgacaggaatcttaaaataccatctggtgctgaatatatgatgtactgaaatactggaattatggctttttgaaatgcagtttttactgtaatcttaacttttatttatcaaaatagctacaggaaacatgaatagcaggaaaacactgaatttgtttggatgttctaagaaatggtgctaagaaaatggtgtctttaatagctaaaaatttaatgcctttatatcatcaagatgctatcagtgtactccagtgcccttgaataataggggtaccttttcattcaagtttttatcataattacctattcttacacaagcttagtttttaaaatgtggacattttaaaggcctctggattttgctcatccagtgaagtccttgtaggacaataaacgtatatatgtacatatatacacaaacatgtatatgtgcacacacatgtatatgtataaatattttaaatggtgttttagaagcactttgtctacctaagctttgacaacttgaacaatgctaaggtactgagatgtttaaaaaacaagtttactttcattttagaatgcaaagttgatttttttaaggaaacaaagaaagcttttaaaatatttttgcttttagccatgcatctgctgatgagcaattgtgtccatttttaacacagccagttaaatccaccatggggcttactggattcaagggaatacgttagtccacaaaacatgttttctggtgctcatctcacatgctatactgtaaaacagttttatacaaaattgtatgacaagttcattgctcaaaaatgtacagttttaagaattttctattaactgcaggtaataattagctgcatgctgcagactcaacaaagctagttcactgaagcctatgctattttatggatcataggctcttcagagaactgaatggcagtctgcctttgtgttgataattatgtacattgtgacgttgtcatttcttagcttaagtgtcctctttaacaagaggattgagcagactgatgcctgcataagatgaataaacagggttagttccatgtgaatctgtcagttaaaaagaaacaaaaacaggcagctggtttgctgtggtggttttaaatcattaatttgtataaagaagtgaaagagttgtatagtaaattaaattgtaaacaaaacttttttaatgcaatgctttagtattttagtactgtaaaaaaattaaatatatacatatatatatatatatatatatatatatatatgagtttgaagcagaattcacatcatgatggtgctactcagcctgctacaaatatatcataatgtgagctaagaattcattaaatgtttgagtgatgttcctacttgtcatatacctcaacactagtttggcaataggatattgaactgagagtgaaagcattgtgtaccatcatttttttccaagtccttttttttattgttaaaaaaaaaagcataccttttttcaatacttgatttcttagcaagtataacttgaacttcaacctttttgttctaaaaattcagggatatttcagctcatgctctccctatgccaacatgtcacctgtgtttatgtaaaattgttgtaggttaataaatatattctttgtcagggatttaacccttttattttgaatcccttctattttacttgtacatgtgctgatgtaactaaaactaattttgtaaatctgttggctctttttattgtaaagaaaagcattttaaaagtttgaggaatcttttgactgtttcaagcaggaaaaaaaaattacatgaaaatagaatgcactgagttgataaagggaaaaattgtaaggcaggagtttggcaagtggctgttggccagagacttacttgtaactctctaaatgaagtttttttgatcctgtaatcactgaaggtacatactccatgtggacttcccttaaacaggcaaacacctacaggtatggtgtgcaacagattgtacaattacattttggcctaaatacatttttgcttactagtatttaaaataaattcttaatcagaggaggcctttgggttttattggtcaaatctttgtaagctggcttttgtctttttaaaaaatttcttgaatttgtggttgtgtccaatttgcaaacatttccaaaaatgtttgctttgcttacaaaccacatgattttaatgttttttgtataccataatatctagccccaaacatttgattactacatgtgcattggtgattttgatcatccattcttaatatttgatttctgtgtcacctactgtcatttgttaaactgctggccaacaagaacaggaagtatagtttggggggttggggagagtttacataaggaagagaagaaattgagtggcatattgtaaatatcagatctataattgtaaatataaaacctgcctcagttagaatgaatggaaagcagatctacaatttgctaatataggaatatcaggttgactatatagccatacttgaaaatgcttctgagtggtgtcaactttacttgaatgaatttttcatcttgattgacgcacagtgatgtacagttcacttctgaagctagtggttaacttgtgtaggaaacttttgcagtttgacactaagataacttctgtgtgcatttttctatgcttttttaaaaactagtttcatttcattttcatgagatgtttggtttataagatctgaggatggttataaatactgtaagtattgtaatgttatgaatgcaggttatttgaaagctgtttattattatatcattcctgataatgctatgtgagtgtttttaataaaatttatatttatttaatgcactctaa

SEQ ID NO: 1361 - DNA, 9236 bp, Homo sapiens
  source 1..9236: mol_type = genomic DNA
aaacagaaggtgggccggggcggggagaaacagaactcggtcaatttcccagtttgtcgggtctttaaaaatacaggcccctaaagcactaagggcatgccctcggtgaaacaggggagcgcttctgctgaatgagattaaagcgacagaaaagggaaaggagagcgcgggcaacgggatctaaagggagatagagacgcgggcctctgagggctggcaaacattcagcagcacaccctctcaagattgtttacttgcctttgctcctgttgagttacaacgcttggaagcaggagatgggctcagcagcagccaataggacatgatccaggaagagcagtaagggactgagctgctgaattcaactagagggcagccttgtggatggccccgaagcaagcctgatggaacaggatagaaccaaccatgttgagggcaacagactaagtccattcctgataccatcacctcccatttgccagacagaacctctggctacaaagctccagaatggaagcccactgcctgagagagctcatccagaagtaaatggagacaccaagtggcactctttcaaaagttattatggaataccctgtatgaagggaagccagaatagtcgtgtgagtcctgactttacacaagaaagtagagggtattccaagtgtttgcaaaatggaggaataaaacgcacagttagtgaaccttctctctctgggctccttcagatcaagaaattgaaacaagaccaaaaggctaatggagaaagacgtaacttcggggtaagccaagaaagaaatccaggtgaaagcagtcaaccaaatgtctccgatttgagtgataagaaagaatctgtgagttctgtagcccaagaaaatgcagttaaagatttcaccagtttttcaacacataactgcagtgggcctgaaaatccagagcttcagattctgaatgagcaggaggggaaaagtgctaattaccatgacaagaacattgtattacttaaaaacaaggcagtgctaatgcctaatggtgctacagtttctgcctcttccgtggaacacacacatggtgaactcctggaaaaaacactgtctcaatattatccagattgtgtttccattgcggtgcagaaaaccacatctcacataaatgccattaacagtcaggctactaatgagttgtcctgtgagatcactcacccatcgcatacctcagggcagatcaattccgcacagacctctaactctgagctgcctccaaagccagctgcagtggtgagtgaggcctgtgatgctgatgatgctgataatgccagtaaactagctgcaatgctaaatacctgttcctttcagaaaccagaacaactacaacaacaaaaatcagtttttgagatatgcccatctcctgcagaaaataacatccagggaaccacaaagctagcgtctggtgaagaattctgttcaggttccagcagcaatttgcaagctcctggtggcagctctgaacggtatttaaaacaaaatgaaatgaatggtgcttacttcaagcaaagctcagtgttcactaaggattccttttctgccactaccacaccaccaccaccatcacaattgcttctttctccccctcctcctcttccacaggttcctcagcttccttcagaaggaaaaagcactctgaatggtggagttttagaagaacaccaccactaccccaaccaaagtaacacaacacttttaagggaagtgaaaatagagggtaaacctgaggcaccaccttcccagagtcctaatccatctacacatgtatgcagcccttctccgatgctttctgaaaggcctcagaataattgtgtgaacaggaatgacatacagactgcagggacaatgactgttccattgtgttctgagaaaacaagaccaatgtcagaacacctcaagcataacccaccaatttttggtagcagtggagagctacaggacaactgccagcagttgatgagaaacaaagagcaagagattctgaagggtcgagacaaggagcaaacacgagatcttgtgcccccaacacagcactatctgaaaccaggatggattgaattgaaggcccctcgttttcaccaagcggaatcccatctaaaacgtaatgaggcatcactgccatcaattcttcagtatcaacccaatctctccaatcaaatgacctccaaacaatacactggaaattccaacatgcctggggggctcccaaggcaagcttacacccagaaaacaacacagctggagcacaagtcacaaatgtaccaagttgaaatgaatcaagggcagtcccaaggtacagtggaccaacatctccagttccaaaaaccctcacaccaggtgcacttctccaaaacagaccatttaccaaaagctcatgtgcagtcactgtgtggcactagatttcattttcaacaaagagcagattcccaaactgaaaaacttatgtccccagtgttgaaacagcacttgaatcaacaggcttcagagactgagccattttcaaactcacaccttttgcaacataagcctcataaacaggcagcacaaacacaaccatcccagagttcacatctccctcaaaaccagcaacagcagcaaaaattacaaataaagaataaagaggaaatactccagacttttcctcacccccaaagcaacaatgatcagcaaagagaaggatcattctttggccagactaaagtggaagaatgttttcatggtgaaaatcagtattcaaaatcaagcgagttcgagactcataatgtccaaatgggactggaggaagtacagaatataaatcgtagaaattccccttatagtcagaccatgaaatcaagtgcatgcaaaatacaggtttcttgttcaaacaatacacacctagtttcagagaataaagaacagactacacatcctgaactttttgcaggaaacaagacccaaaacttgcatcacatgcaatattttccaaataatgtgatcccaaagcaagatcttcttcacaggtgctttcaagaacaggagcagaagtcacaacaagcttcagttctacagggatataaaaatagaaaccaagatatgtctggtcaacaagctgcgcaacttgctcagcaaaggtacttgatacataaccatgcaaatgtttttcctgtgcctgaccagggaggaagtcacactcagacccctccccagaaggacactcaaaagcatgctgctctaaggtggcatctcttacagaagcaagaacagcagcaaacacagcaaccccaaactgagtcttgccatagtcagatgcacaggccaattaaggtggaacctggatgcaagccacatgcctgtatgcacacagcaccaccagaaaacaaaacatggaaaaaggtaactaagcaagagaatccacctgcaagctgtgataatgtgcagcaaaagagcatcattgagaccatggagcagcatctgaagcagtttcacgccaagtcgttatttgaccataaggctcttactctcaaatcacagaagcaagtaaaagttgaaatgtcagggccagtcacagttttgactagacaaaccactgctgcagaacttgatagccacaccccagctttagagcagcaaacaacttcttcagaaaagacaccaaccaaaagaacagctgcttctgttctcaataattttatagagtcaccttccaaattactagatactcctataaaaaatttattggatacacctgtcaagactcaatatgatttcccatcttgcagatgtgtaggtaagtgccagaaatgtactgagacacatggcgtttatccagaattagcaaatttatcttcagatatgggattttccttctttttttaaatcttgagtctggcagcaatttgtaaaggctcataaaaatctgaagcttacattttttgtcaagttaccgatgcttgtgtcttgtgaaagagaacttcacttacatgcagtttttccaaaagaattaaataatcgtgcatgtttatttttccctctcttcagatcctgtaaaatttgaatgtatctgttttagatcaattcgcctatttagctctttgtatattatctcctggagagacagctaggcagcaaaaaaacaatctattaaaatgagaaaataacgaccataggcagtctaatgtacgaactttaaatattttttaattcaaggtaaaatatattagtttcacaagatttctggctaatagggaaattattatcttcagtcttcatgagttgggggaaatgataatgctgacactcttagtgctcctaaagtttccttttctccatttatacatttggaatgttgtgatttatattcattttgattcccttttctctaaaatttcatctttttgattaaaaaatatgatacaggcatacctcagagatattgtgggtttggctccataccacaataaaatgaatattacaataaagcaagttgtaaggactttttggtttctcactgtatgtaaaagttatttatatactatactgtaacatactaagtgtgcaatagcattgtgtctaaaaaatatatactttaaaaataatttattgttaaaaaaatgccaacaattatctgggcctttagtgagtgctaatctttttgctggtggagggtcgtgcttcagtattgatcgctgtggactgatcatggtggtagttgctgaaggttgctgggatggctgtgtgtgtggcaatttcttaaaataagacaacagtgaagtgctgtatcaattgatttttccattcacaaaagatttctctgtagcatgcaatgctgtttgatagcatttaacccacagcagaatttctttgaaaattggactcagtcctctcaaactgtgctgctgctttatcaactaagtttttgtaattttctgaatcctttgttgtcatttcagcagtttacagcatcttcattggaagtatattccatctcaaacattctttgttcatccataagaagcaacttcttatcaagttttttcatgacattgcagtaactcagccccatcttcaggctctacttctaattctggttctcttgctacatctccctcatctgcagtgacctctccacggaagtcttgaactcctcaaagtaatccatgagggttggaatcaacttctaaactcctgttaatgttgatatattgaccccctcccatgaattatgaatgttcttaataacttctaaatggtgatacctttccagaaggctttcaatgtactttgcccggatccatcagaagactatcttggcagctgtagactaacaatatatttcttaaatgataagacttgaaagtcaaaagtactccttaatccataggctgcagaatcaatgttgtattaacaggcacgaaaacagcattaatcttgtgcatctccatcggagctcttgggtgactaggtgccttgagcagtaatattttgaaaggaggttttggttttgttttttgttttttttttttgttttttagcagtaagtctcaacactgggcttaaaatattcagtaaactatgttgtaaaaagatgtgttatcatccagactttgttgttccattactctacacaagcagggtacacttagcataattcttaagggccttggaattttcagaatggtaaatgagtatgggcttcaacttaaaatcatcaactgcattagcctgtaacaagagagtcagcctgtcctttgaagcaaggcattgacttctatctatgaaagtcttagatggcaccttgtttcaatagtaggctgtttagtacagccaccttcatcagtgatcttagctagatcttctgcataacttgctgcagcttctacatcagcacttgctgcctcaccttgtccttttatgttatagagacagctgcgcttcttaaactttataaaccaacttctgctagcttccaacttctcttctgcagcttcctcattctcttcatagaactgaagggagtcaaggccttgctctggattaagctttggcttaaggaatgttgtggctgacgtgatcttctatccagaccactaaagcgctctccatatcagcaataaggccgttttgctttcttacctttcatgtgttcactggagtaatttccttcaagaatttttcctttacattcacaacttggctaactggcatgcaaggcctagctttcagcctgtcttggcttttgacatgccttcctcacttagctcgtcatatctagcttttgatttaaagtggcaggcatacaactcttcctttcacttgaacacttagaggccactgtagggttattaattggcctaatttcaatattgttgtgttttagggaatagagaggcccagggagagggagagagcccaaacggctggttgatagagcaggcagaatgcacacaacatttatcagattatgtttgcaccatttaccagattatgggtacggtttgtggcaccccccaaaaattagaatagtaacatcaaagatcactgatcacagatcgccataacataaataataataaactttaaaatactgtgagaattaccaaaatgtgatacagagacatgaagtgagcacatgctgttgaaaaaaatgacactgatagacatacttaacacgtgggattgccacaaaccttcagtttgtaaaagtcacagtaactgtgactcacaaaagaacaaagcacaataaaacgaggtatgcctgtatttttaaaaaaagctttttgttaaaattcaggatatgtaataggtctgtaggaatagtgaaatatttttgctgatggatgtagatatatacgtggatagagatgaagatcttaattatagctatgcagcatagatttagtcaaagacatttgaaaagacaaatgttaaattagtgtggctaatgacctacccgtgccatgttttccctcttgcaatgagataccccacactgtgtagaaggatggagggaggactcctactgtccctctttgcgtgtggttattaagttgcctcactgggctaaaacaccacacatctcatagataatatttggtaagttgtaatcgtcttcactcttctcttatcacccacccctatcttcccacttttccatctttgttggtttgcaacagccccttctttttgcctgactctccaggattttctctcatcataaattgttctaaagtacatactaatatgggtctggattgactattcttatttgcaaaacagcaattaaatgttatagggaagtaggaagaaaaaggggtatccttgacaataaaccaagcaatattctgggggtgggatagagcaggaaattttatttttaatcttttaaaatccaagtaataggtaggcttccagttagctttaaatgttttttttttccagctcaaaaaattggattgtagttgatactacatataatacattctaattccctcactgtattctttgtttagtttcatttatttggtttaaaataattttttatcccatatctgaaatgtaatatatttttatccaacaaccagcatgtacatatacttaattatgtggcacattttctaatagatcagtccatcaatctactcattttaaagaaaaaaaaattttaaagtcacttttagagcccttaatgtgtagttgggggttaagctttgtggatgtagcctttatatttagtataattgaggtctaaaataataatcttctattatctcaacagagcaaattattgaaaaagatgaaggtcctttttatacccatctaggagcaggtcctaatgtggcagctattagagaaatcatggaagaaaggtaattaacgcaaaggcacagggcagattaacgtttatccttttgtatatgtcagaatttttccagccttcacacacaaagcagtaaacaattgtaaattgagtaattattagtaggcttagctattctagggttgccaacactacacactgtgctattcaccagagagtcacaatatttgacaggactaatagtctgctagctggcacaggctgcccactttgcgatggatgccagaaaacccaggcatgaacaggaatcggccagccaggctgccagccacaaggtactggcacaggctccaacgagaggtcccactctggctttcccacctgataataaagtgtcaaagcagaaagactggtaaagtgtggtataagaaaagaaccactgaattaaattcacctagtgttgcaaatgagtacttatctctaagttttcttttaccataaaaagagagcaagtgtgatatgttgaatagaaagagaaacatactatttacagctgcctttttttttttttttcgctatcaatcacaggtatacaagtacttgcctttactcctgcatgtagaagactcttatgagcgagataatgcagagaaggcctttcatataaatttatacagctctgagctgttcttcttctagggtgccttttcattaagaggtaggcagtattattattaaagtacttaggatacattggggcagctaggacatattcagtatcattcttgctccatttccaaattattcatttctaaattagcatgtagaagttcactaaataatcatctagtggcctggcagaaatagtgaatttccctaagtgccttttttttgttgtttttttgttttgttttttaaacaagcagtaggtggtgctttggtcataagggaagatatagtctatttctaggactattccatattttccatgtggctggatactaactatttgccagcctccttttctaaattgtgagacattcttggaggaacagttctaactaaaatctattatgactccccaagttttaaaatagctaaatttagtaagggaaaaaatagtttatgttttagaagactgaacttagcaaactaacctgaattttgtgctttgtgaaattttatatcgaaatgagctttcccattttcacccacatgtaatttacaaaatagttcattacaattatctgtacattttgatattgaggaaaaacaaggcttaaaaaccattatccagtttgcttggcgtagacctgtttaaaaaataataaaccgttcatttctcaggatgtggtcatagaataaagttatgctcaaatgttcaaatatttaaa

SEQ ID NO: 1362 - DNA, 5969 bp, Homo sapiens
  source 1..5969: mol_type = genomic DNA
tcaggctctacttctaattctggttctcttgctacatctccctcatctgcagtgacctctccacggaagtcttgaactcctcaaaagcaaattattgaaaaagatgaaggtcctttttatacccatctaggagcaggtcctaatgtggcagctattagagaaatcatggaagaaaggtttggacagaagggtaaagctattaggattgaaagagtcatctatactggtaaagaaggcaaaagttctcagggatgtcctattgctaagtgggtggttcgcagaagcagcagtgaagagaagctactgtgtttggtgcgggagcgagctggccacacctgtgaggctgcagtgattgtgattctcatcctggtgtgggaaggaatcccgctgtctctggctgacaaactctactcggagcttaccgagacgctgaggaaatacggcacgctcaccaatcgccggtgtgccttgaatgaagagagaacttgcgcctgtcaggggctggatccagaaacctgtggtgcctccttctcttttggttgttcatggagcatgtactacaatggatgtaagtttgccagaagcaagatcccaaggaagtttaagctgcttggggatgacccaaaagaggaagagaaactggagtctcatttgcaaaacctgtccactcttatggcaccaacatataagaaacttgcacctgatgcatataataatcagattgaatatgaacacagagcaccagagtgccgtctgggtctgaaggaaggccgtccattctcaggggtcactgcatgtttggacttctgtgctcatgcccacagagacttgcacaacatgcagaatggcagcacattggtatgcactctcactagagaagacaatcgagaatttggaggaaaacctgaggatgagcagcttcacgttctgcctttatacaaagtctctgacgtggatgagtttgggagtgtggaagctcaggaggagaaaaaacggagtggtgccattcaggtactgagttcttttcggcgaaaagtcaggatgttagcagagccagtcaagacttgccgacaaaggaaactagaagccaagaaagctgcagctgaaaagctttcctccctggagaacagctcaaataaaaatgaaaaggaaaagtcagccccatcacgtacaaaacaaactgaaaacgcaagccaggctaaacagttggcagaacttttgcgactttcaggaccagtcatgcagcagtcccagcagccccagcctctacagaagcagccaccacagccccagcagcagcagagaccccagcagcagcagccacatcaccctcagacagagtctgtcaactcttattctgcttctggatccaccaatccatacatgagacggcccaatccagttagtccttatccaaactcttcacacacttcagatatctatggaagcaccagccctatgaacttctattccacctcatctcaagctgcaggttcatatttgaattcttctaatcccatgaacccttaccctgggcttttgaatcagaatacccaatatccatcatatcaatgcaatggaaacctatcagtggacaactgctccccatatctgggttcctattctccccagtctcagccgatggatctgtataggtatccaagccaagaccctctgtctaagctcagtctaccacccatccatacactttaccagccaaggtttggaaatagccagagttttacatctaaatacttaggttatggaaaccaaaatatgcagggagatggtttcagcagttgtaccattagaccaaatgtacatcatgtagggaaattgcctccttatcccactcatgagatggatggccacttcatgggagccacctctagattaccacccaatctgagcaatccaaacatggactataaaaatggtgaacatcattcaccttctcacataatccataactacagtgcagctccgggcatgttcaacagctctcttcatgccctgcatctccaaaacaaggagaatgacatgctttcccacacagctaatgggttatcaaagatgcttccagctcttaaccatgatagaactgcttgtgtccaaggaggcttacacaaattaagtgatgctaatggtcaggaaaagcagccattggcactagtccagggtgtggcttctggtgcagaggacaacgatgaggtctggtcagacagcgagcagagctttctggatcctgacattgggggagtggccgtggctccaactcatgggtcaattctcattgagtgtgcaaagcgtgagctgcatgccacaacccctttaaagaatcccaataggaatcaccccaccaggatctccctcgtcttttaccagcataagagcatgaatgagccaaaacatggcttggctctttgggaagccaaaatggctgaaaaagcccgtgagaaagaggaagagtgtgaaaagtatggcccagactatgtgcctcagaaatcccatggcaaaaaagtgaaacgggagcctgctgagccacatgaaacttcagagcccacttacctgcgtttcatcaagtctcttgccgaaaggaccatgtccgtgaccacagactccacagtaactacatctccatatgccttcactcgggtcacagggccttacaacagatatatatgatatcacccccttttgttggttacctcacttgaaaagaccacaaccaacctgtcagtagtatagttctcatgacgtgggcagtggggaaaggtcacagtattcatgacaaatgtggtgggaaaaacctcagctcaccagcaacaaaagaggttatcttaccatagcacttaattttcactggctcccaagtggtcacagatggcatctaggaaaagaccaaagcattctatgcaaaaagaaggtggggaagaaagtgttccgcaatttacatttttaaacactggttctattattggacgagatgatatgtaaatgtgatcccccccccccgcttacaactctacacatctgtgaccacttttaataatatcaagtttgcatagtcatggaacacaaatcaaacaagtactgtagtattacagtgacaggaatcttaaaataccatctggtgctgaatatatgatgtactgaaatactggaattatggctttttgaaatgcagtttttactgtaatcttaacttttatttatcaaaatagctacaggaaacatgaatagcaggaaaacactgaatttgtttggatgttctaagaaatggtgctaagaaaatggtgtctttaatagctaaaaatttaatgcctttatatcatcaagatgctatcagtgtactccagtgcccttgaataataggggtaccttttcattcaagtttttatcataattacctattcttacacaagcttagtttttaaaatgtggacattttaaaggcctctggattttgctcatccagtgaagtccttgtaggacaataaacgtatatatgtacatatatacacaaacatgtatatgtgcacacacatgtatatgtataaatattttaaatggtgttttagaagcactttgtctacctaagctttgacaacttgaacaatgctaaggtactgagatgtttaaaaaacaagtttactttcattttagaatgcaaagttgatttttttaaggaaacaaagaaagcttttaaaatatttttgcttttagccatgcatctgctgatgagcaattgtgtccatttttaacacagccagttaaatccaccatggggcttactggattcaagggaatacgttagtccacaaaacatgttttctggtgctcatctcacatgctatactgtaaaacagttttatacaaaattgtatgacaagttcattgctcaaaaatgtacagttttaagaattttctattaactgcaggtaataattagctgcatgctgcagactcaacaaagctagttcactgaagcctatgctattttatggatcataggctcttcagagaactgaatggcagtctgcctttgtgttgataattatgtacattgtgacgttgtcatttcttagcttaagtgtcctctttaacaagaggattgagcagactgatgcctgcataagatgaataaacagggttagttccatgtgaatctgtcagttaaaaagaaacaaaaacaggcagctggtttgctgtggtggttttaaatcattaatttgtataaagaagtgaaagagttgtatagtaaattaaattgtaaacaaaacttttttaatgcaatgctttagtattttagtactgtaaaaaaattaaatatatacatatatatatatatatatatatatatatatatgagtttgaagcagaattcacatcatgatggtgctactcagcctgctacaaatatatcataatgtgagctaagaattcattaaatgtttgagtgatgttcctacttgtcatatacctcaacactagtttggcaataggatattgaactgagagtgaaagcattgtgtaccatcatttttttccaagtccttttttttattgttaaaaaaaaaagcataccttttttcaatacttgatttcttagcaagtataacttgaacttcaacctttttgttctaaaaattcagggatatttcagctcatgctctccctatgccaacatgtcacctgtgtttatgtaaaattgttgtaggttaataaatatattctttgtcagggatttaacccttttattttgaatcccttctattttacttgtacatgtgctgatgtaactaaaactaattttgtaaatctgttggctctttttattgtaaagaaaagcattttaaaagtttgaggaatcttttgactgtttcaagcaggaaaaaaaaattacatgaaaatagaatgcactgagttgataaagggaaaaattgtaaggcaggagtttggcaagtggctgttggccagagacttacttgtaactctctaaatgaagtttttttgatcctgtaatcactgaaggtacatactccatgtggacttcccttaaacaggcaaacacctacaggtatggtgtgcaacagattgtacaattacattttggcctaaatacatttttgcttactagtatttaaaataaattcttaatcagaggaggcctttgggttttattggtcaaatctttgtaagctggcttttgtctttttaaaaaatttcttgaatttgtggttgtgtccaatttgcaaacatttccaaaaatgtttgctttgcttacaaaccacatgattttaatgttttttgtataccataatatctagccccaaacatttgattactacatgtgcattggtgattttgatcatccattcttaatatttgatttctgtgtcacctactgtcatttgttaaactgctggccaacaagaacaggaagtatagtttggggggttggggagagtttacataaggaagagaagaaattgagtggcatattgtaaatatcagatctataattgtaaatataaaacctgcctcagttagaatgaatggaaagcagatctacaatttgctaatataggaatatcaggttgactatatagccatacttgaaaatgcttctgagtggtgtcaactttacttgaatgaatttttcatcttgattgacgcacagtgatgtacagttcacttctgaagctagtggttaacttgtgtaggaaacttttgcagtttgacactaagataacttctgtgtgcatttttctatgcttttttaaaaactagtttcatttcattttcatgagatgtttggtttataagatctgaggatggttataaatactgtaagtattgtaatgttatgaatgcaggttatttgaaagctgtttattattatatcattcctgataatgctatgtgagtgtttttaataaaatttatatttatttaatgcactctaa

SEQ ID NO: 1363 - DNA, 4594 bp, Homo sapiens
  source 1..4594: mol_type = genomic DNA
gtagagaagcagaaggaagcaagatggctgccctttaggatttgttagaaaggagacccgactgcaactgctggattgctgcaaggctgagggacgagaacgaggctggcaaacattcagcagcacaccctctcaagattgtttacttgcctttgctcctgttgagttacaacgcttggaagcaggagatgggctcagcagcagccaataggacatgatccaggaagagcagtaagggactgagctgctgaattcaactagagggcagccttgtggatggccccgaagcaagcctgatggaacaggatagaaccaaccatgttgagggcaacagactaagtccattcctgataccatcacctcccatttgccagacagaacctctggctacaaagctccagaatggaagcccactgcctgagagagctcatccagaagtaaatggagacaccaagtggcactctttcaaaagttattatggaataccctgtatgaagggaagccagaatagtcgtgtgagtcctgactttacacaagaaagtagagggtattccaagtgtttgcaaaatggaggaataaaacgcacagttagtgaaccttctctctctgggctccttcagatcaagaaattgaaacaagaccaaaaggctaatggagaaagacgtaacttcggggtaagccaagaaagaaatccaggtgaaagcagtcaaccaaatgtctccgatttgagtgataagaaagaatctgtgagttctgtagcccaagaaaatgcagttaaagatttcaccagtttttcaacacataactgcagtgggcctgaaaatccagagcttcagattctgaatgagcaggaggggaaaagtgctaattaccatgacaagaacattgtattacttaaaaacaaggcagtgctaatgcctaatggtgctacagtttctgcctcttccgtggaacacacacatggtgaactcctggaaaaaacactgtctcaatattatccagattgtgtttccattgcggtgcagaaaaccacatctcacataaatgccattaacagtcaggctactaatgagttgtcctgtgagatcactcacccatcgcatacctcagggcagatcaattccgcacagacctctaactctgagctgcctccaaagccagctgcagtggtgagtgaggcctgtgatgctgatgatgctgataatgccagtaaactagctgcaatgctaaatacctgttcctttcagaaaccagaacaactacaacaacaaaaatcagtttttgagatatgcccatctcctgcagaaaataacatccagggaaccacaaagctagcgtctggtgaagaattctgttcaggttccagcagcaatttgcaagctcctggtggcagctctgaacggtatttaaaacaaaatgaaatgaatggtgcttacttcaagcaaagctcagtgttcactaaggattccttttctgccactaccacaccaccaccaccatcacaattgcttctttctccccctcctcctcttccacaggttcctcagcttccttcagaaggaaaaagcactctgaatggtggagttttagaagaacaccaccactaccccaaccaaagtaacacaacacttttaagggaagtgaaaatagagggtaaacctgaggcaccaccttcccagagtcctaatccatctacacatgtatgcagcccttctccgatgctttctgaaaggcctcagaataattgtgtgaacaggaatgacatacagactgcagggacaatgactgttccattgtgttctgagaaaacaagaccaatgtcagaacacctcaagcataacccaccaatttttggtagcagtggagagctacaggacaactgccagcagttgatgagaaacaaagagcaagagattctgaagggtcgagacaaggagcaaacacgagatcttgtgcccccaacacagcactatctgaaaccaggatggattgaattgaaggcccctcgttttcaccaagcggaatcccatctaaaacgtaatgaggcatcactgccatcaattcttcagtatcaacccaatctctccaatcaaatgacctccaaacaatacactggaaattccaacatgcctggggggctcccaaggcaagcttacacccagaaaacaacacagctggagcacaagtcacaaatgtaccaagttgaaatgaatcaagggcagtcccaaggtacagtggaccaacatctccagttccaaaaaccctcacaccaggtgcacttctccaaaacagaccatttaccaaaagctcatgtgcagtcactgtgtggcactagatttcattttcaacaaagagcagattcccaaactgaaaaacttatgtccccagtgttgaaacagcacttgaatcaacaggcttcagagactgagccattttcaaactcacaccttttgcaacataagcctcataaacaggcagcacaaacacaaccatcccagagttcacatctccctcaaaaccagcaacagcagcaaaaattacaaataaagaataaagaggaaatactccagacttttcctcacccccaaagcaacaatgatcagcaaagagaaggatcattctttggccagactaaagtggaagaatgttttcatggtgaaaatcagtattcaaaatcaagcgagttcgagactcataatgtccaaatgggactggaggaagtacagaatataaatcgtagaaattccccttatagtcagaccatgaaatcaagtgcatgcaaaatacaggtttcttgttcaaacaatacacacctagtttcagagaataaagaacagactacacatcctgaactttttgcaggaaacaagacccaaaacttgcatcacatgcaatattttccaaataatgtgatcccaaagcaagatcttcttcacaggtgctttcaagaacaggagcagaagtcacaacaagcttcagttctacagggatataaaaatagaaaccaagatatgtctggtcaacaagctgcgcaacttgctcagcaaaggtacttgatacataaccatgcaaatgtttttcctgtgcctgaccagggaggaagtcacactcagacccctccccagaaggacactcaaaagcatgctgctctaaggtggcatctcttacagaagcaagaacagcagcaaacacagcaaccccaaactgagtcttgccatagtcagatgcacaggccaattaaggtggaacctggatgcaagccacatgcctgtatgcacacagcaccaccagaaaacaaaacatggaaaaaggtaactaagcaagagaatccacctgcaagctgtgataatgtgcagcaaaagagcatcattgagaccatggagcagcatctgaagcagtttcacgccaagtcgttatttgaccataaggctcttactctcaaatcacagaagcaagtaaaagttgaaatgtcagggccagtcacagttttgactagacaaaccactgctgcagaacttgatagccacaccccagctttagagcagcaaacaacttcttcagaaaagacaccaaccaaaagaacagctgcttctgttctcaataattttatagagtcaccttccaaattactagatactcctataaaaaatttattggatacacctgtcaagactcaatatgatttcccatcttgcagatgtgtagagcaaattattgaaaaagatgaaggtcctttttatacccatctaggagcaggtcctaatgtggcagctattagagaaatcatggaagaaaggtatacaagtacttgcctttactcctgcatgtagaagactcttatgagcgagataatgcagagaaggcctttcatataaatttatacagctctgagctgttcttcttctagggtgccttttcattaagaggtaggcagtattattattaaagtacttaggatacattggggcagctaggacatattcagtatcattcttgctccatttccaaattattcatttctaaattagcatgtagaagttcactaaataatcatctagtggcctggcagaaatagtgaatttccctaagtgccttttttttgttgtttttttgttttgttttttaaacaagcagtaggtggtgctttggtcataagggaagatatagtctatttctaggactattccatattttccatgtggctggatactaactatttgccagcctccttttctaaattgtgagacattcttggaggaacagttctaactaaaatctattatgactccccaagttttaaaatagctaaatttagtaagggaaaaaatagtttatgttttagaagactgaacttagcaaactaacctgaattttgtgctttgtgaaattttatatcgaaatgagctttcccattttcacccacatgtaatttacaaaatagttcattacaattatctgtacattttgatattgaggaaaaacaaggcttaaaaaccattatccagtttgcttggcgtagacctgtttaaaaaataataaaccgttcatttctcaggatgtggtcatagaataaagttatgctcaaatgttcaaa

What is claimed is:

1. A cell or a population of cells engineered to express a chimeric antigen receptor (CAR), wherein the CAR comprises an antigen-binding domain, a transmembrane domain, and an intracellular signaling domain wherein the intracellular signaling domain comprises a primary signaling domain and/or a costimulatory signaling domain, and wherein expression and/or function of Tet1, Tet2 and/or Tet3 in said cell has been reduced or eliminated.

2. The cell of claim 1, wherein the antigen-binding domain binds to a tumor antigen selected from the group consisting of: CD19, CD123, CD22, CD30, CD171, CS-1, CLL-1, CD33, EGFRvIII, TSHR, GD2, GD3, BCMA, Tn Ag, PSMA, ROR1, FLT3, FAP, TAG72, CD38, CD44v6, CEA, EPCAM, B7H3, KIT, IL-13Ra2, Mesothelin, IL-11Ra, PSCA, PRSS21, VEGFR2, LewisY, CD24, PDGFR-beta, SSEA-4, CD20, Folate receptor alpha, ERBB2 (Her2/neu), MUC1, EGFR, NCAM, Prostase, PAP, ELF2M, Ephrin B2, IGF-I receptor, CAIX, LMP2, gp100, bcr-abl, tyrosinase, EphA2, Fucosyl GM1, sLe, GM3, TGS5, HMWMAA, o-acetyl-GD2, Folate receptor beta, TEM1/CD248, TEM7R, CLDN6, GPRC5D, CXORF61, CD97, CD179a, ALK, Polysialic acid, PLAC1, GloboH, NY-BR-1, UPK2, HAVCR1, ADRB3, PANX3, GPR20, LY6K, OR51E2, TARP, WT1, NY-ESO-1, LAGE-1a, MAGE-A1, legumain, HPV E6, E7, MAGE A1, ETV6-AML, sperm protein 17, XAGE1, Tie 2, MAD-CT-1, MAD-CT-2, Fos-related antigen 1, p53, p53 mutant, prostein, survivin and telomerase, PCTA-1/Galectin 8, MelanA/MART1, Ras mutant, hTERT, sarcoma translocation breakpoints, ML-IAP, ERG (TMPRSS2 ETS fusion gene), NA17, PAX3, Androgen receptor, Cyclin B1, MYCN, RhoC, TRP-2, CYPIB1, BORIS, SART3, PAX5, OY-TES1, LCK, AKAP-4, SSX2, RAGE-1, human telomerase reverse transcriptase, RU1, RU2, intestinal carboxyl esterase, mut hsp70-2, CD79a, CD79b, CD72, LAIR1, FCAR, LILRA2, CD300LF, CLEC12A, BST2, EMR2, LY75, GPC3, FCRL5, and IGLL1.

3. The cell of claim 1, wherein the transmembrane domain comprises:
an amino acid sequence having at least one, two or three modifications but not more than 20, 10 or 5 modifications of the amino acid sequence of SEQ ID NO: 12, or a sequence with 95-99% identity to the amino acid sequence of SEQ ID NO: 12; or
the sequence of SEQ ID NO: 12.

4. The cell of claim 1, wherein the antigen binding domain is connected to the transmembrane domain by a hinge region, wherein said hinge region comprises SEQ ID NO: 2 or SEQ ID NO: 6, or a sequence with 95-99% identity thereof.

5. The cell of claim 1, wherein the intracellular signaling domain comprises a primary signaling domain and/or a costimulatory signaling domain, wherein the primary signaling domain comprises:
(i) a functional signaling domain of a protein chosen from CD3 zeta, CD3 gamma, CD3 delta, CD3 epsilon, common FcR gamma (FCER1G), FcR beta (Fc Epsilon Rib), CD79a, CD79b, Fcgamma RIIa, DAP10, or DAP12; or
(ii) an amino acid sequence having at least one, two or three modifications but not more than 20, 10 or 5 modifications of the amino acid sequence of SEQ ID NO: 18 or SEQ ID NO: 20, a sequence with 95-99% identity to the amino acid sequence of SEQ ID NO: 18 or SEQ ID NO: 20, or the amino acid sequence of SEQ ID NO:18 or SEQ ID NO: 20.

6. The cell of claim 1, wherein the intracellular signaling domain comprises a costimulatory signaling domain, or a primary signaling domain and a costimulatory signaling domain, wherein:
(i) the costimulatory signaling domain comprises a functional signaling domain of a protein selected from the group consisting of CD27, CD28, 4-1BB (CD137), OX40, CD30, CD40, PD-1, ICOS, lymphocyte function-associated antigen-1 (LFA-1), CD2, CD7, LIGHT, NKG2C, B7-H3, a ligand that specifically binds with CD83, CDS, ICAM-1, GITR, BAFFR, HVEM (LIGHTR), SLAMF7, NKp80 (KLRF1), CD160, CD19, CD4, CD8alpha, CD8beta, IL2R beta, IL2R gamma, IL7R alpha, ITGA4, VLA1, CD49a, ITGA4, IA4, CD49D, ITGA6, VLA-6, CD49f, ITGAD, CD11d, ITGAE, CD103, ITGAL, CD11a, LFA-1, ITGAM, CD11b, ITGAX, CD11c, ITGB1, CD29, ITGB2, CD18, LFA-1, ITGB7, TNFR2, TRANCE/RANKL, DNAM1 (CD226), SLAMF4 (CD244, 2B4), CD84, CD96 (Tactile), CEACAM1, CRTAM, Ly9 (CD229), CD160 (BY55), PSGL1, CD100 (SEMA4D), CD69, SLAMF6 (NTB-A, Ly108), SLAM (SLAMF1, CD150, IPO-3), BLAME (SLAMF8), SELPLG (CD162), LTBR, LAT, GADS, SLP-76, PAG/Cbp, NKp44, NKp30, NKp46, and NKG2D;
(ii) the costimulatory signaling domain comprises an amino acid sequence having at least one, two or three modifications but not more than 20, 10 or 5 modifications of the amino acid sequence of SEQ ID NO: 14 or SEQ ID NO: 16, or a sequence with 95-99% identity to the amino acid sequence of SEQ ID NO: 14 or SEQ ID NO: 16;
(iii) the costimulatory signaling domain comprises the amino acid sequence of SEQ ID NO: 14 or SEQ ID NO: 16; or
(iv) the intracellular signaling domain comprises the amino acid sequence of SEQ ID NO: 14 or SEQ ID NO: 16, and the amino acid sequence of SEQ ID NO: 18 or SEQ ID NO: 20, wherein the sequences comprising the intracellular signaling domain are expressed in the same frame and as a single polypeptide chain.

7. The cell of claim 1, wherein the CAR further comprising a leader sequence comprising the amino acid sequence of SEQ ID NO: 2.

8. The cell of claim 1, wherein the cell comprises a human immune effector cell or a population of immune effector cells comprising a T cell, or an NK cell, wherein the T cell comprises a CD4+ T cell, a CD8+ T cell, or a combination thereof.

9. The cell of claim 1, wherein the cell comprises an inhibitor of Tet1, Tet2, and/or Tet3, wherein the inhibitor of Tet1, Tet2 and/or Tet3 is
(1) a gene editing system targeted to one or more sites within the gene encoding Tet1, Tet2 and/or Tet3, or the regulatory elements of Tet1, Tet2 and/or Tet3;
(2) a nucleic acid encoding one or more components of said gene editing system; or
(3) combinations thereof.

10. The cell of claim 9, wherein the gene editing system is selected from the group consisting of: a CRISPR/Cas9 system, a zinc finger nuclease system, a TALEN system, and a meganuclease system.

11. The cell of claim 9, wherein the gene editing system binds to:
(i) a target sequence in an early exon or intron of a gene encoding Tet1, Tet2 and/or Tet3;
(ii) a target sequence of a gene encoding tet2, and the target sequence is upstream of exon 4, wherein the target sequence is in exon 1, exon 2, or exon 3;
(iii) a target sequence in a late exon or intron of a gene encoding Tet1, Tet2 and/or Tet3; or
(iv) a target sequence of a gene encoding tet2, and the target sequence is downstream of exon 8, wherein the target sequence is in exon9, exon10, or exon11.

12. The cell of claim 9, wherein the gene editing system is a CRISPR/Cas system comprising a gRNA molecule comprising a targeting sequence which hybridizes to a target sequence of a Tet2 gene.

13. The cell of claim 12, wherein the targeting sequence is a targeting sequence listed in Table 3 or Table 5.

14. The cell of claim 9, wherein the inhibitor of Tet2 is:
(i) an siRNA or shRNA specific for Tet1, Tet2, Tet3, or nucleic acid encoding said siRNA or shRNA;
(ii) a small molecule; or
(iii) a protein.

15. The cell of claim 14, wherein the siRNA or shRNA comprises a sequence complementary to a sequence of a Tet2 mRNA, wherein the shRNA comprises a target sequence of shRNA listed in Table 4.

16. The cell of claim 14, wherein the inhibitor of Tet1, Tet2, and/or Tet3 is a protein, comprising: a dominant negative binding partner of Tet1, Tet2, and/or Tet3, wherein the dominant negative binding partner comprises:
(i) a histone deacetylase (HDAC) that interacts with Tet1, Tet2, and/or Tet3, or a nucleic acid encoding said HDAC that interacts with Tet1, Tet2, and Tet3; or
(ii) a catalytically inactive Tet1, Tet2 or Tet3, or a nucleic acid encoding said catalytically inactive Tet1, Tet2 or Tet3.

17. A method of increasing the therapeutic efficacy of a CAR-expressing cell of claim 1, comprising a step of
(i) decreasing the level of 5-hydroxymethylcytosine in said cell; and/or
(ii) contacting said cell with a Tet inhibitor,
wherein the Tet inhibitor comprises an inhibitor of Tet1, Tet2 and/or Tet3.

18. The method of claim 17, wherein the Tet inhibitor is selected from the group consisting of:
(1) a gene editing system targeted to one or more sites within the gene encoding Tet1, Tet2, or Tet3, or its corresponding regulatory elements;
(2) a nucleic acid comprising an siRNA or shRNA that inhibits expression of Tet1, Tet2, or Tet3;
(3) a protein comprising a dominant negative, or a catalytically inactive Tet1, Tet2, or Tet3, or a binding partner of Tet1, Tet2, or Tet3;
(4) a small molecule that inhibits expression and/or function of Tet1, Tet2, or Tet3;
(5) a nucleic acid encoding any of (1)-(3); and
(6) any combination of (1)-(5).

19. The method of claim 17, wherein the Tet inhibitor is a Tet2 inhibitor.

20. The method of claim 17, wherein said contacting occurs ex vivo or in vivo.

21. The method of claim 20, wherein the contacting occurs in vivo prior to delivery of nucleic acid encoding a CAR into the cell or after the cells have been administered to a subject in need thereof.

22. A method of treating a subject comprising administering to said subject an effective amount of the cell of claim 1, wherein the method further comprises administering a Tet1, Tet2, and/or Tet3 inhibitor.

23. A method of treating a subject comprising administering to said subject in need thereof, a chimeric antigen receptor (CAR)-expressing cell therapy and a Tet1, Tet2, and/or Tet3 inhibitor.

24. The method of claim 23, wherein the subject has a disease associated with expression of a tumor antigen, wherein the disease associated with expression of the tumor antigen is chosen from a proliferative disease, a precancerous condition, a cancer, or a non-cancer related indication.

25. The method of claim 24, wherein:
(i) the cancer is a hematologic cancer chosen from one or more of chronic lymphocytic leukemia (CLL), acute leukemias, acute lymphocytic leukemia (ALL), B-cell acute lymphocytic leukemia (B-ALL), T-cell acute lymphocytic leukemia (T-ALL), chronic myelogenous leukemia (CML), B cell prolymphocytic leukemia, blastic plasmacytoid dendritic cell neoplasm, Burkitt's lymphoma, diffuse large B cell lymphoma, follicular lymphoma, hairy cell leukemia, small cell- or a large cell-follicular lymphoma, malignant lymphoproliferative conditions, MALT lymphoma, mantle cell lymphoma, marginal zone lymphoma, multiple myeloma, myelodysplasia and myelodysplastic syndrome, non-Hodgkin's lymphoma, Hodgkin's lymphoma, plasmablastic lymphoma, plasmacytoid dendritic cell neoplasm, Waldenstrom macroglobulinemia, or pre-leukemia; or
(ii) the cancer is selected from the group consisting of colon cancer, rectal cancer, renal-cell carcinoma, liver cancer, non-small cell carcinoma of the lung, cancer of the small intestine, cancer of the esophagus, melanoma, bone cancer, pancreatic cancer, skin cancer, cancer of the head or neck, cutaneous or intraocular malignant melanoma, uterine cancer, ovarian cancer, rectal cancer, cancer of the anal region, stomach cancer, testicular cancer, uterine cancer, carcinoma of the fallopian tubes, carcinoma of the endometrium, carcinoma of the cervix, carcinoma of the vagina, carcinoma of the vulva, Hodgkin's Disease, non-Hodgkin's lymphoma, cancer of the endocrine system, cancer of the thyroid gland, cancer of the parathyroid gland, cancer of the adrenal gland, sarcoma of soft tissue, cancer of the urethra, cancer of the penis, solid tumors of childhood, cancer of the bladder, cancer of the kidney or ureter, carcinoma of the renal pelvis, neoplasm of the central nervous system (CNS), primary CNS lymphoma, tumor angiogenesis, spinal axis tumor, brain stem glioma, pituitary adenoma, Kaposi's sarcoma, epidermoid cancer, squamous cell cancer, T-cell lymphoma, environmentally induced cancers, combinations of said cancers, and metastatic lesions of said cancers.

26. A method of manufacturing the chimeric antigen receptor (CAR)-expressing cell of claim 1, comprising introducing a nucleic acid encoding the CAR into an immune effector cell such that said nucleic acid or CAR-encoding portion thereof, integrates into the genome of the cell within a Tet1, Tet2 and/or Tet3 gene, wherein said integration occurs within an intron or exon of a Tet1, Tet2 and/or Tet3 gene, such that Tet1, Tet2 and/or Tet3 expression and/or function is reduced or eliminated.

27. A vector comprising a nucleic acid sequence encoding a CAR and a nucleic acid sequence encoding a Tet inhibitor, wherein the Tet inhibitor comprises a Tet1, Tet2, and/or Tet3 inhibitor.

28. A gene editing system that is specific for a sequence of a Tet1, Tet2 or Tet3 gene or its regulatory elements.

29. The gene editing system of claim 28, wherein the gene editing system is (1) a CRISPR/Cas gene editing system; (2) a zinc finger nuclease system; (3) a TALEN system; or (4) a meganuclease system.

30. A composition for the ex vivo manufacture of the CAR-expressing cell of claim 1, comprising a Tet inhibitor, wherein the Tet inhibitor:
(i) comprises a Tet1, Tet2, and/or Tet3 inhibitor; and/or
(ii) is selected from N-[3-[7-(2,5-dimethyl-2H-pyrazol-3-ylamino)-1-methyl-2-oxo-1,4-dihydro-2H-pyrimido[4,5-d]pyrimidin-3-yl]-4-methylphenyl]-3-trifluoromethyl-benzamide, 2-[(2,6-dichloro-3-methylphenyl)amino]benzoic acid and 2-hydroxyglutarate.

31. A population of cells comprising one or more cells of claim 1, wherein the population of cells comprises a higher percentage of Tscm cells, wherein the Tscm cells comprise CD45RA+CD62L+CCR7+CD27+CD95+ T cells, than a population of cells which does not comprise one or more cells in which expression and/or function of Tet1, Tet2 and/or Tet3 in said cell has been reduced or eliminated.
